United States Patent Application Publication US 2020/0109395 A1 - sequence listing, part 22

SEQ ID NO: 91325 - protein, 556 aa, Yersinia pestis A1122; identical to SEQ ID NO: 91169

SEQ ID NO: 91326 - protein, 362 aa, Yersinia pestis; identical to SEQ ID NO: 91166

SEQ ID NO: 91327 - protein, 556 aa, Yersinia pestis; identical to SEQ ID NO: 91169

SEQ ID NO: 91328 - protein, 362 aa, Yersinia pestis Antiqua; identical to SEQ ID NO: 91166

SEQ ID NO: 91329 - protein, 556 aa, Yersinia pestis Antiqua; identical to SEQ ID NO: 91169

SEQ ID NO: 91330 - protein, 362 aa, Yersinia pestis Angola; identical to SEQ ID NO: 91166

SEQ ID NO: 91331 - protein, 556 aa, Yersinia pestis Angola
MKKLILKKIMILSDSGKSARQFEFGEHLTLITADDDNSVGKSTLAKMIFWTFGCEPIFSEVWRTLDCTSIIEFEINNAPYIIHRYKNEIKIRHSNGKLHSFPKITGDYSKYFSELVNFNVLLPKKGQLTLETPPPAYYFIPFYIDQKRTWAKPWDSFENLQQYSSWAKPVISYHSGLFIKAHFEVEKDIYVIKRELEEVEKGVTELNNAVIILRQNLIDTDNVLPSTEFIFSVIQESEKNKKNLLEERTNLRVEKIRLESQIKLAKGIISELDKDYIFSVENMEDGDIECPTCGTIHENSIAHRTSILIDMELAKNQLESLESEVNGIINLLVIKDEEITEQSNKSERSYNNVIESDSNSLISFTNDKFEKRAHEINSKKNITIEIKKSEEKTAKKSQSDILSKKQKSEIKQSFADRLSKYITKLKVNVDISKIKSPLDYKKIYKVGGAAEDARAVLGYYLAIYEQVADSCEEALPPLVIDTPNQQEQASGNYTNIIKSISDGINNDRQYVICAMEHKALEQIKTNAQVIKLDARKILLQDQYEKISKLRNEVIFD

SEQ ID NO: 91332 - protein, 362 aa, Yersinia pestis; identical to SEQ ID NO: 91166

SEQ ID NO: 91333 - protein, 556 aa, Yersinia pestis; identical to SEQ ID NO: 91169

SEQ ID NO: 91334 - protein, 362 aa, Yersinia pestis; identical to SEQ ID NO: 91166

SEQ ID NO: 91335 - protein, 556 aa, Yersinia pestis; identical to SEQ ID NO: 91169

SEQ ID NO: 91336 - protein, 362 aa, Yersinia pestis str. Pestoides B; identical to SEQ ID NO: 91166

SEQ ID NO: 91337 - protein, 556 aa, Yersinia pestis str. Pestoides B; identical to SEQ ID NO: 91169

SEQ ID NO: 91338 - protein, 362 aa, Yersinia pestis Pestoides G; identical to SEQ ID NO: 91166

SEQ ID NO: 91339 - protein, 381 aa, Yersinia pestis Pestoides G; identical to SEQ ID NO: 91177

SEQ ID NO: 91340 - protein, 362 aa, Yersinia pestis; identical to SEQ ID NO: 91166

SEQ ID NO: 91341 - protein, 556 aa, Yersinia pestis; identical to SEQ ID NO: 91169

SEQ ID NO: 91342 - protein, 362 aa, Yersinia pestis; identical to SEQ ID NO: 91166

SEQ ID NO: 91343 - protein, 496 aa, Yersinia pestis; identical to SEQ ID NO: 91167

SEQ ID NO: 91344 - protein, 362 aa, Yersinia pestis subsp. pestis bv. Orientalis; identical to SEQ ID NO: 91166

SEQ ID NO: 91345 - protein, 556 aa, Yersinia pestis subsp. pestis bv. Orientalis; identical to SEQ ID NO: 91169

SEQ ID NO: 91346 - protein, 362 aa, Yersinia pestis; identical to SEQ ID NO: 91166

SEQ ID NO: 91347 - protein, 556 aa, Yersinia pestis
MKKLILKKIMILSDSGKSARQFEFGEHLTLITADDDNSVGKSTLAKMIFWTFGCEPIFSEVWRTLDCTSIIEFEINNAPYIIHRYKNEIKIRHSNGKLHSFPKITGDYSKYFSELVNFNVLLPKKGQLTLETPPPAYYFIPFYIDQKRTWAKPWDSFENLQQYSSWAKPVISYHSGLFIKAHFEVEKDIYVIKRELEEVEKGVTELNNAVIILRQNLIDTDNVLPSTEFIFSVIQESEKNKKNLLEERTNLRVEKIRLESQIKLAKGIISELDKDYIFSVENMEDGDIECPTCGTIHENSIAHRTSILIDMELAKNQLESLESEVNGIINLLVIKDEEITEQSNKSERSYNNVIESDSNSLISFTNDKFEKRAHEINSKKNITIEIKKSEEKTAKKSQSDILSKEQKSEIKQSFADRLSKYITKLKVNVDISKIKNPLDYKKIYEVGGAAEDARAVLGYYLAIYEQVADSCEEALPPLVIDTPNQQEQASGNYTNIIKSISDGINNDRQYVICAMEHKALEQIKTNAQVIKLDARKILLQDQYEKISKLRNEVIFD

SEQ ID NO: 91348 - protein, 362 aa, Yersinia pestis 14735; identical to SEQ ID NO: 91166

SEQ ID NO: 91349 - protein, 381 aa, Yersinia pestis 14735; identical to SEQ ID NO: 91177

SEQ ID NO: 91350 - protein, 362 aa, Yersinia pestis 1670; identical to SEQ ID NO: 91166

SEQ ID NO: 91351 - protein, 381 aa, Yersinia pestis 1670; identical to SEQ ID NO: 91177

SEQ ID NO: 91352 - protein, 362 aa, Yersinia pestis 790; identical to SEQ ID NO: 91166

SEQ ID NO: 91353 - protein, 556 aa, Yersinia pestis 790; identical to SEQ ID NO: 91169

SEQ ID NO: 91354 - protein, 362 aa, Yersinia pestis 1412; identical to SEQ ID NO: 91166

SEQ ID NO: 91355 - protein, 381 aa, Yersinia pestis 1412; identical to SEQ ID NO: 91177

SEQ ID NO: 91356 - protein, 362 aa, Yersinia pestis 1522; identical to SEQ ID NO: 91166

SEQ ID NO: 91357 - protein, 381 aa, Yersinia pestis 1522; identical to SEQ ID NO: 91177

SEQ ID NO: 91358 - protein, 362 aa, Yersinia pestis 1045; identical to SEQ ID NO: 91166

SEQ ID NO: 91359 - protein, 556 aa, Yersinia pestis 1045; identical to SEQ ID NO: 91169

SEQ ID NO: 91360 - protein, 362 aa, Yersinia pestis 8787; identical to SEQ ID NO: 91166

SEQ ID NO: 91361 - protein, 381 aa, Yersinia pestis 8787; identical to SEQ ID NO: 91177

SEQ ID NO: 91362 - protein, 362 aa, Yersinia pestis 3770; identical to SEQ ID NO: 91166

SEQ ID NO: 91363 - protein, 381 aa, Yersinia pestis 3770; identical to SEQ ID NO: 91177

SEQ ID NO: 91364 - protein, 362 aa, Yersinia pestis 3067; identical to SEQ ID NO: 91166

SEQ ID NO: 91365 - protein, 381 aa, Yersinia pestis 3067; identical to SEQ ID NO: 91177

SEQ ID NO: 91366 - protein, 362 aa, Yersinia pestis 2944; identical to SEQ ID NO: 91166

SEQ ID NO: 91367 - protein, 556 aa, Yersinia pestis 2944; identical to SEQ ID NO: 91169

SEQ ID NO: 91368 - protein, 362 aa, Yersinia pestis 1413; identical to SEQ ID NO: 91166

SEQ ID NO: 91369 - protein, 381 aa, Yersinia pestis 1413; identical to SEQ ID NO: 91177

SEQ ID NO: 91370 - protein, 362 aa, Yersinia pestis; identical to SEQ ID NO: 91166

SEQ ID NO: 91371 - protein, 496 aa, Yersinia pestis; identical to SEQ ID NO: 91167

SEQ ID NO: 91372 - protein, 362 aa, Yersinia pestis; identical to SEQ ID NO: 91166

SEQ ID NO: 91373 - protein, 556 aa, Yersinia pestis; identical to SEQ ID NO: 91169

SEQ ID NO: 91374 - protein, 362 aa, Yersinia pestis CO92; identical to SEQ ID NO: 91166

SEQ ID NO: 91375 - protein, 556 aa, Yersinia pestis CO92; identical to SEQ ID NO: 91169

SEQ ID NO: 91376 - protein, 362 aa, Yersinia pestis; identical to SEQ ID NO: 91166

SEQ ID NO: 91377 - protein, 556 aa, Yersinia pestis; identical to SEQ ID NO: 91169

SEQ ID NO: 91378 - protein, 390 aa, Yersinia pseudotuberculosis PB1/+; identical to SEQ ID NO: 91164

SEQ ID NO: 91379 - protein, 585 aa, Yersinia pseudotuberculosis PB1/+; identical to SEQ ID NO: 91165

SEQ ID NO: 91380 - protein, 392 aa, Yersinia pseudotuberculosis IP 32953
MIMNELHEIKPREQAGRDTLERYNAQVRAASIACLSILEGKDVVRVYCEFHDDFVIEKNKLGKIAYSFVQVKTKDKLSDIWKLNDVFGILTRNSKKKPQTDEKVVNSFIGKLIQHTVNFPETCENIIFMTNTHVNEDIDAVVTDLLNEDFSNKHTLFLIEKFNGFFSPALSLTDEQIKVNLKKIIINSDVQYIKSQNNNFESLAKDVIYKYSEIDLQYVEAKEIIISLQSLVNSKSSVKIKSVTKDSLLSASGVGIDDLLSVLSISKVAYYELLKGGDEKAIKSASVIERMLRRAGAKDDEVEYCAKCKTKWDGWLRINRHILPAIDITVIEGYIGDIISELSRGRNIVRLSLLRTLMNNLIDKLEKEKIVYDLNNDLICGGIFSQLVRNEK

SEQ ID NO: 91381 - protein, 371 aa, Yersinia pseudotuberculosis IP 32953
MKLVSLFLKGRAVSGLESEVLIFAKEITELFGPNGSGKTPLLQSVVYCLGYPCKFRDDIYNFCEYAQLEFEISGEKYTSRRDFKQKEFYIRLVGSNGQVEHFHNEITYSKYIIGLLKLPYPSLVTIKNEQTHPYLSTLLPIFYVDQDDGYSRYYSAHNNFIKDQFSEMLRVIFGLPERNSFISKKELIDAEAQLEYLDKVLVVQRREVELARSEINVNRKLEDIDLAISNLNRELSDLKDDSNNKNDALSSMNVLISSHKKRIRILNDELDDINRRKISLAKIKDEINIEINTLNINEEAKRVFRSFKEICPSDGCKMFSQSSESYGKNLLYLRDQIKDIERNIELDSHSVDKIKSELDTTKKTNRRNSRN

SEQ ID NO: 91382 - protein, 405 aa, Yersinia pseudotuberculosis NBRC 105692
MDTKLLFVHSDKWMIMNELHEIKPREQAGRDTLERYNAQVRAASIACLSILEGKDVVRVYCEFHDDFVIEKNKLGKIAYSFVQVKTKDKLSDIWKLNDVFGILTRNSKKKPQTDEKVVNSFIGKLIQHTVNFPETCENIIFMTNTHVNEDIDAVVTDLLNEDFSNKHTLFLIEKFNGFFSPALSLTDEQIKVNLKKIIINSDVQYIKSQNNNFESLAKDVIYKYSEIDLQYVEAKEIIISLQSLVNSKSSVKIKSVTKDSLLSASGVGIDDLLSVLSISKVAYYELLKGGDEKAIKSASVIERMLRRAGAKDDEVEYCAKCKTKWDGWLRINRHILPAIDITVIEGYIGDIISELSRGRNIVRLSLLRTLMNNLIDKLEKEKIVYDLNNDLICGGIFSQLVRNEK

SEQ ID NO: 91383 - protein, 585 aa, Yersinia pseudotuberculosis NBRC 105692; identical to SEQ ID NO: 91165

SEQ ID NO: 91384 - protein, 390 aa, Yersinia pseudotuberculosis IP 32953; identical to SEQ ID NO: 91164

SEQ ID NO: 91385 - protein, 585 aa, Yersinia pseudotuberculosis IP 32953; identical to SEQ ID NO: 91165

SEQ ID NO: 91386 - protein, 390 aa, Yersinia pseudotuberculosis; identical to SEQ ID NO: 91164

SEQ ID NO: 91387 - protein, 585 aa, Yersinia pseudotuberculosis; identical to SEQ ID NO: 91165

SEQ ID NO: 91388 - protein, 390 aa, Yersinia pseudotuberculosis
MNELHEIKPREQAGRDTLEKYNAQVRAASIACLSILEGKDVVRVYCEFHDDFVIEKNKLGKIAYSFVQVKTKDKLSDIWKLNDVFGILTRNSKKKPQTDEKVVNSFIGKLIQHTVNFPETCENIIFMTNTHVNEDIDAVVTDLLNEDFSNKHTLFLIEKFNGFFSPALSLTDEQIKVNLKKIIINSDVQYIKSQNNNFESLAKDVIYKYSEIDLQYVEAKEIIISLQSLVNSKSSVKIKSVTKDSLLSASGVGIDDLLSVLSISKVAYYELLKGGDEKAIKSASVIERMLRRAGAKDDEVEYCAKCKTKWDGWLRINRHILPAIDITVIEGYIGDIISELSRGRNIVRLSLLRTLMNNLIDKLEKEKIVYDLNNDLICGGIFSQLVRNEK

SEQ ID NO: 91389 - protein, 585 aa, Yersinia pseudotuberculosis; identical to SEQ ID NO: 91165

SEQ ID NO: 91390 - protein, 390 aa, Yersinia pseudotuberculosis PB1/+; identical to SEQ ID NO: 91164

SEQ ID NO: 91391 - protein, 585 aa, Yersinia pseudotuberculosis PB1/+; identical to SEQ ID NO: 91165

SEQ ID NO: 91392 - protein, 390 aa, Yersinia pseudotuberculosis; identical to SEQ ID NO: 91164

SEQ ID NO: 91393 - protein, 585 aa, Yersinia pseudotuberculosis; identical to SEQ ID NO: 91165

SEQ ID NO: 91394 - protein, 362 aa, Yersinia pseudotuberculosis
MDSEDTSDNPLSEPQRESAGAQSYDRFEYQYHWALCKAFSSYKESNDFAIFMEYHEDVVYANSIDKNKVKFTFNQIKANAKKTYTAKVLTKRENGTKPSLLGKLCSSVSDKKYFEKVEKLDFITTSGFNLTKNNKLNLASYKLSSLSSDEASEIIKCLSDELANFGKFPQEIIHFTTSDIPLESYYEHTISRITDSVEEVNPQHLLRTKDIYRILMDSLRIRGKNVFDYENWNDALTKKALTYKDIHTVVTKRVSKGNSDLNFEAIKYILDDLNLKGTIKAKIIQKINSYSLTLLSPTLAIIKAQKEIQELLKKNSKKIEIEMSYELLERLIIDLSKDTIGLFEDNISISSAIIYEMVEATN

SEQ ID NO: 91395 - protein, 556 aa, Yersinia pseudotuberculosis
MKKLILKKIMILSDSGKSARQFEFGEHLTLITADDDNSVGKSTLAKMIFWTFGCEPIFSEVWRTLDCTSIIEFEINNAPYIIHRYKNEIKIRHSNGKLHSFPKITGDYSKYFSELVNFNVLLPKKGQLTLETPPPAYYFIPFYIDQKRTWAKPWDSFENLQQYSSWAKPVISYHSGLFIKAHFEVEKDIYVIKRELEEVEKGVTELNNAAIILRQNLIDTDNVLPSTEFIFSVIQESEKNKKNLLEERTNLRVEKIRLESQIKLAKGIISELDKDYIFSVENMEDGDIECPTCGTIHENSIAHRTSILIDMELAKNQLESLESEVNGIINLLVIKDEEITEQSNKSERSYNNVIESDSNSLISFTNDKFEKRVHEINSKKNITIEIKKSEEKTAKKSQSDILSKEQKSEIKQSFADRLSKYITKLKVNVDISKIKSPLDYKKIYEVGGAAEDARAVLGYYLAIYEQVADSCEEALPPLVIDTPNQQEQASGNYTNIIKSISDGINNDRQYVICTMEHKALEQIKTNAQVIKLDARKILLQDQYEKISKLRNEVIFD

SEQ ID NO: 91396 - protein, 362 aa, Yersinia pseudotuberculosis; identical to SEQ ID NO: 91160

SEQ ID NO: 91397 - protein, 585 aa, Yersinia pseudotuberculosis
MSKLILKNILAYSINGNGIFSTEFGESVNIIHGRNTSGKSTLMQSILYSMGVNDSKENLNDIISENVIFRLECEMQNINTFEKIVFVRLDDTLVVRIADNPPIRFDGINGNNSFEYGRYKELFNKLFNFKLILQKQADFTNAPIEAAFLPFYISQSVGWVYLRESIGDYRFYKDFKFDYLDYYTGLKNRTDRLKKYTLKKEKQQLEYERSQLIKYKSKDNSLKLSETLETRFKGKALDYLKSYDQLATTLISEEANHDKLCNKLSMLRGREKVLLQTIRNLKLQKPRVDRCPVCEQTLPGDIRELYIYTQDINDALREKEIISDKIKTISASLNSVEKKIKDSSGIINNEYRVLKESRVESIGFESWINHHANITILGEIKNKERDYDEKISGLQTNIDNLANDAEIDTLRYGIEKEFLGIFQEKAKCLEVKIPDSSRYKNLYSITSFPYQGVELHKIIMAYHFSFYQLISKRTTIHKFPFLLDAVFKEDIDVGNREIIFNFLSSEAKNHEQILFSVAEYKKEKNPTEGDPLFNINEINNRYFSGSAKQICIGNAKTVRSFLLQKSLNEDEQFLLDDAFSLLQTI

SEQ ID NO: 91398 - protein, 390 aa, Yersinia pseudotuberculosis; identical to SEQ ID NO: 91164

SEQ ID NO: 91399 - protein, 585 aa, Yersinia pseudotuberculosis
MKLVSLFLKGRAVSGLESEVLIFAKEITELFGPNGSGKTPLLQSVVYCLGYPCKFRDDIYNFCEYAQLEFEISGEKYTSRRDFKQKEFYIRLVGSNGQVEHFHNEITYSKYIIGLLNLPYPSLVTIKNEQTHPYLSTLLPIFYVDQDDGYSRYYSAHNNFIKDQFSEMLRVIFGLPERNSFISKKELIDAEAQLEYLDKVLVVQRREVELARSEINVNRKLEDIDLAISNLNRELSDLKDDSNNKNDALSSMNVLISSHKKRIRILNDELDDINRRKISLAKIKDEINIEINTLNINEEAKRVFRSFKEICPSDGCKMFSQSSESYGKNLLYLRDQIKDIERNIELDSHSVDKIKSELDTTKKLIEEILEIRDQIAKSEGISSIVETISIITANIFTLQLEKSELQKVGMLEEKYFENLNKRELAQDRVETLKKGKGIIPRVTKLKIDLKLAYIKWLEILNTLNIDKNITFKDDFYPNLGSEVLTQLKGSTRVRAILAYKAALVELMCVGDKMPFKFIIFDTPKQHETHYEDIDKFMNELKVLSMKYGFQVVFSSTEYKYVGDSNDMIWEPKFPGEEHEMFLERN

SEQ ID NO: 91400 - protein, 362 aa, Yersinia pseudotuberculosis; identical to SEQ ID NO: 91394

SEQ ID NO: 91401 - protein, 556 aa, Yersinia pseudotuberculosis; identical to SEQ ID NO: 91395

SEQ ID NO: 91402 - protein, 362 aa, Yersinia pseudotuberculosis; identical to SEQ ID NO: 91160

SEQ ID NO: 91403 - protein, 585 aa, Yersinia pseudotuberculosis; identical to SEQ ID NO: 91397

SEQ ID NO: 91404 - protein, 362 aa, Yersinia pseudotuberculosis; identical to SEQ ID NO: 91394

SEQ ID NO: 91405 - protein, 556 aa, Yersinia pseudotuberculosis; identical to SEQ ID NO: 91395

SEQ ID NO: 91406 - protein, 362 aa, Yersinia pseudotuberculosis; identical to SEQ ID NO: 91394

SEQ ID NO: 91407 - protein, 556 aa, Yersinia pseudotuberculosis; identical to SEQ ID NO: 91395

SEQ ID NO: 91408 - protein, 390 aa, Yersinia pseudotuberculosis; identical to SEQ ID NO: 91164

SEQ ID NO: 91409 - protein, 585 aa, Yersinia pseudotuberculosis; identical to SEQ ID NO: 91165

SEQ ID NO: 91410 - protein, 343 aa, Edwardsiella tarda ATCC 23685
RGGEIAIRGFEYQRCWAIDELLNRHKKNESYVFIPEYHDDILILNSPVSPTIATFAQVKTRDTHWTITPLIKSDGEGKLSFISKLFKHKYDFSSYQTDLTFITNALFKFFDKYEFNADELKEKEKGKVLNAVQAQLPGFSSSDLSSLKFKTSNLSLLDYDAHLLGKTVEYLEDTNASEVINAMAFKRTLVELFEKKTRVSSKEIKTFNELIEKKGISNELISELTLKIKALKTNFPDWENMSLLLSVLHKDDFEKLTLKIKYELFLVNVKNASSIEHDFYRTLKQYNYKGKLNATNIPDFILGSISYASKQLDEFGQLIDDDYKYIMACCAVIEMMSDNEAKK

SEQ ID NO: 91411 - protein, 554 aa, Edwardsiella tarda ATCC 23685
MNQVIFKRVAILSLSEKKAFTFNFSEGLNFIHGTNDTGKSSLIKSLYFCLGGDLRLDDSWKKQEIITKLTLSYQDNIIDFIRKSSYFVVTVYKDGVKKSEKLFSKVSELTGEIQSLFGFNLLLTLKKNKETILANPASFFFPFYIDQDDGWSNVLESFNGLKMYVDWQKNALQYHSGIKPKEYYALNGEQKILALNINELEQEAELIRKTKFRFEKYFENIRFDIDVDFYIDKIDYFIKQCEDLELQERIYRLQALNLYSKRNIVSDLIFNIENERVSVSSEENGEDDISFSLNKYEINKNKVSLFSQKASLYDEKNKLDEQLSIIRIKLLEHREKSEYIKSMLSNVHEKFSIKEIIDSEAYKSATLAFEHQLSEIQERINALALEKVTIDAKIKAFNNIKRTKTINDYFLLMLNKAQTKLHLPISDKGGVIKYKALTTGKTGSSSPRAIFAYHYALLMTIKEFSTLPILPIVIDSPKQQDLDDELTEQLIQFCLDDLAEISQVIIGAVKPEKNMVGYHSINLFEKFSLLQPDTFDGVFQEIVPQLNEMLAHLD

SEQ ID NO: 91412 - protein, 357 aa, Edwardsiella tarda ATCC 15947 = NBRC 105688
MNLANALIQVPQDERGGEIAIRGFEYQRCWAIDELLNRHKKNESYVFIPEYHDDILILNSPVSPTIATFAQVKTRDTHWTITPLIKSDGEGKLSFISKLFKHKYDFSSYQTDLTFITNALFKFFDKYEFNADELKEKEKGKVLNAVQAQLPGFSSSDLSSLKFKTSNLSLLDYDAHLLGKTVEYLEDTNASEVINAMAFKRTLVELFEKKTRVSSKEIKTFNELIEKKGISNELISELTLKIKALKTNFPDWENMSLLLSVLHKDDFEKLTLKIKYELFLVNVKNASSIEHDFYRTLKQYNYKGKLNATNIPDFILGSISYASKQLDEFGQLIDDDYKYIMACCAVIEMMSDNEAKK

SEQ ID NO: 91413 - protein, 554 aa, Edwardsiella tarda ATCC 15947 = NBRC 105688; identical to SEQ ID NO: 91411

SEQ ID NO: 91414 - protein, 362 aa, Aeromonas veronii
MGLAEALVHIPQSERGGEIAQRGFDYQSCWALSEMLEYELNGKSYVFIFEYHDDILILDNTISPKDLTFAQVKTNESHWTASSLSKSTSKKPISIIGKLFIHYKDFIEYSPQLLFVTNAALKLCDCNGGKSFFGAHEVKKEHQDKFKQAIKDQAKLDDSCIDLSVMRFIQSSLSLEDHITHLKGKLCNFISKKYGDSSTLNVNVLASLLDQECRSKSKIKSADIINFSDLIAKKGFSSQDLNNVLDSLNTSNKNLPTWEMAKPVFHDLGKNALQIIKLQATFLQVCIEINQEIKNPSRIYQKVAIELYDEQKIHLNLNEYVIATIDKIDACCPDYDLALTACKKECIIIYSIIQMLLKGDDK

SEQ ID NO: 91415 - protein, 550 aa, Aeromonas veronii
MRHIYFKSAHILSLRDKRGFTFEFSPDINIITGANDTGKSSFIKSLYYTLGADIRLDKKWKQDSFVSKVVICVNKRDYAFVRHEKRISIFDITDGNERLLVTSNSRTEIALTVRDIFDFNLELVLNKTLVQRQAYPASLYLPFYIDQDDGWGTVLNSFSSLKMYKDWQKNILNFHAGVKPKEYYKLQGEISLIDINLKEIRATLKALETAKKRFEASFGRVLFDIDIDYYEELLERFLSKCQQLHQEETEYRIKLIKLLSQRDELVSEIDSSQKQLDECDIDDLSPSASLEAKYAVLKNRDILFQVIPKLYDQKSLYDDQINKIKEDLKNSQRLSSDLKDMLQEVKEQLTLQDVIKSQASKQVESTFDEQIDELLRKIGKLDLSRTTLSEELAAYNNIKRTREINDKFKESLIFAQTELGIKDPTVGTILQFSPISKSETGSRAPRAILAYHYALLKTIEDKSTNPMLPVVIDSPKQQDPDPHTTEKLFNLCIGGLSTNNQLIIGSVSFERKTDEFKTLIMTKKYSLLKEELYDEAYKEVMPLYQKASLS

SEQ ID NO: 91416 - protein, 362 aa, Aeromonas veronii; identical to SEQ ID NO: 91414

SEQ ID NO: 91417 - protein, 550 aa, Aeromonas veronii; identical to SEQ ID NO: 91415

SEQ ID NO: 91418 - protein, 362 aa, Aeromonas veronii; identical to SEQ ID NO: 91414

SEQ ID NO: 91419 - protein, 550 aa, Aeromonas veronii; identical to SEQ ID NO: 91415

SEQ ID NO: 91420 - protein, 362 aa, Aeromonas veronii; identical to SEQ ID NO: 91414

SEQ ID NO: 91421 - protein, 550 aa, Aeromonas veronii; identical to SEQ ID NO: 91415

SEQ ID NO: 91422 - protein, 362 aa, Vibrio cholerae AM-19226
MGLAEALISIPQSERGGEIAQRGFDYQTCWALSQMLEYELDGKDYVFIFEYHDDVLILDSEDDPQDLTFAQVKTRESNWTVHNLLKSTEKKPISIIGKLFLHQKNFSGYSPKLLFVTNASFNFHTKAGGKTCFDVNSIESTDQEKFKQAIKEQVELEQEHIDLSTLRFVQSSLSLDDHMTHLKGKLCDFLGKKYGESTTLSPNVLATLLESECRQKSKFKSADIANFMDLVTRKGFSSKAFNNVIESLNASNSLKPDWEMAEPVFKDLNKGALQLIHLKASFSQICIDLNKNKKTPSSVYLEHAISLYDQIKIDKDLKFYITETIVNIDALCPDYTMTLNLGKKECIVVYSIIQKLLEEGHK

SEQ ID NO: 91423 - protein, 549 aa, Vibrio cholerae AM-19226
MKRIYFKSAHILSLRDKKGFFFEFSPNVNIISGENDTGKSSFIKSLYHTLGADIRLDKKWKNDNFISKVIIHVKNRDYAFIRHNKRISIFDLTEGQRHLVTSNSRSDIAEIVRDIFDFNLELVVKKTAIQAQALPASLYLPFYIDQDNGWGKVLDSFSNLAMYTDWQKNILHFHAGIKPKEYYKLQGEMNLIDLDLGEIFATLKALEAAKKRFEASFGRVLFDVDVEYYEELLGRFLSKCQELHQEETAYRIKLIELLSHRDEIVSEIEECKRQLDDNDIDSLSTSAGLDAKYTVLANREKLLEIIPELYEQKSVYDEKIVNIKEELRSAQKLSSKLKTMLQEVKENLTLQDIIKSQASKQVEFTFDEQIKELHEKIGQLNATKNTLAKKISEFTDKKRTQEINDKFKESLKYAQTELGIQEPVLGTILQYGNITKSETGSRGPRAILAYHYALLKTIEEKSTIPMLPVVIDSPKQQDPDKNTTKKLFDLCIDGLSNKNQLIIGSVSFERDTDEFQTLTMTDKYSLLKPNLYDEVYEQIMPLYKQVAFP

SEQ ID NO: 91424 - protein, 371 aa, Vibrio cholerae BJG-01
MSTQDIDENSGVEALLGFEFQRNCALLLLLDDYSSYTSKNYFISIEHYDDFLFGFRDSNNQKLELIKSYQAKKRTDQKWNITALAEPTSKMLDVGKAIKSDIVAKASNFQSDLIFISDRLIELKSENLNKGKNKKAEYVLEKIRHDNPYMSYTELPDILRNHVQESVRNASKNQYGDSEFDRLAYQWVDLPKTSRNQLAILETRVRENFKGVPDAKAALSVLLNLFKSIETVYNKRSKISLMDSRKILEGEDIKKAVEVITSQQKALDFWRACASELCPRIKLNMGKANKAKEYIGIAFELFKDKSNQEHKKIYNFVKNNHYEDCCFDHASTIEMFIDEYYKSNLYSNAIEREDVIFAIICAYVQTRDITV

SEQ ID NO: 91425 - protein, 178 aa, Vibrio cholerae BJG-01
MKIINYKELFVFDRVKKTGFLQDFISGINIISGRNTSGKSTLIQSLLYVFGINDEKENLEDIITDFTVFSLRFEIENNGVKSEYTIIRESDNVYVKSPNGRVDSFRGVSSNISIEHTKLKVFVSELFGFSLYLEQQGKMKPASLEVMFLPYYVSQSVGWVYLRSSFSNLNFYKNFKED

SEQ ID NO: 91426 - protein, 362 aa, Vibrio cholerae HE-25; identical to SEQ ID NO: 91422

SEQ ID NO: 91427 - protein, 549 aa, Vibrio cholerae HE-25; identical to SEQ ID NO: 91423

SEQ ID NO: 91428 - protein, 362 aa, Vibrio cholerae O1 str. 87395; identical to SEQ ID NO: 91422

SEQ ID NO: 91429 - protein, 549 aa, Vibrio cholerae O1 str. 87395
MKRIYFKSAHILSLRDKKGFFFEFSPNVNIISGENDTGKSSFIKSLYHTLGADIRLDKKWKNDNFISKVIIHVKNRDYAFIRHNKRISIFDLTEGQRHLVTSNSRSDIAEIVREIFDFNLELVVKKTAIQAQALPASLYLPFYIDQDNGWGKVLDSFSNLAMYTDWQKNILHFHAGIKPKEYYKLQGEMNLIDLDLGEIFATLKALEAAKKRFEASFGRVLFDVDVEYYEELLGRFLSKCQELHQEETAYRIKLIELLSHRDEIVSEIEECKRQLDDNDIDSLSTSAGLDAKYTVLANREKLLEIIPELYEQKSVYDEKIVNIKEELRSAQKLSSKLKTMLQEVKENLTLQDIIKSQASKQVEFTFDEQIKELHEKIGQLNATKNTLAKKISEFTDKKRTQEINDKFKESLKYAQTELGIQEPVLGTILQYGNITKSETGSRGPRAILAYHYALLKTIEEKSTIPMLPVVIDSPKQQDPDKNTTKKLFDLCIDGLSNKNQLIIGSVSFERDTDEFQTLTMTDKYSLLKPNLYDEVYEQIMPLYKQVAFP

SEQ ID NO: 91430 - protein, 362 aa, Vibrio cholerae O1 str. EM-1676A
MGLAEALISIPQSERGGEIAQRGFDYQTCWALSQMLEYELDGKDYVFIFEYHDDVLILDSEDDPQDLTFAQVKTRESNWTVHNLLKSTEKKPISIIGKLFLHQKNFSGYSPKLLFVTNASFNFHTKAGGKTCFDVNSIESTDQEKFKQAIKEQVELEQEHIDLSTLRFVQSSLSLDDHMTHLKGKLCDFLGEKYGESTTLSPNVLATLLESECRQKSKFKSADIANFMDLVTRKGFSSKAFNNVIESLNASNSLKPDWEMAEPVFKDLNKGALQLIPLKASFSQICIDLNKNKKTPSSVYLEHAISLYDQIKIDKDLKFYITETIVNIDALCPDYTMTLNLGKKECIVVYSIIQKLLEEGDK

SEQ ID NO: 91431 - protein, 549 aa, Vibrio cholerae O1 str. EM-1676A
MKTIYFKSAHILSLRDRKGFFFEFSPNVNIISGENDTGKSSFIKSLYHTLGADIRLDKKWKSDNFISKVIIHVKNRDYAFIRHNKRISIFDLTEGQRHLVTSNSRSDIAEIVREIFDFNLELVVKKTAIQAQALPASLYLPFYIDQDNGWGKVLDSFSNLAMYTDWQKNILHFHAGIKPKEYYKLQGEMNLIDLDLGEIFATLKALEAAKKRFEASFGRVLFDVDVEYYEELLGRFLSKCQELHQEETAYRIKLIELLSHRDEIVSEIEECKRQLDDNDVDSLSTSAGLDAKYTVLANREKLLEIIPELYEQKSVYDEKIVNIKEELRSAQKLSSNLKTMLQEVKENLTLQDIIKSQASKQVEFTFDEQIKELHEKIGQLNATKNTLAKKISEFTDKKRTQEINDKFKESLKYAQTELGIQEPVLGTILQYGNITKSETGSRGPRAILAYHYALLKTIEEKSTIPMLPVVIDSPKQQDPDKNTTKKLFDLCIDGLSNKNQLIIGSVSFERDTDEFQTLTMTDKYSLLKPNLYDEVYEQIMPLYKQVAFP

SEQ ID NO: 91432 - protein, 357 aa, Vibrio fischeri SR5
MADNPLAEAQRESAGASTFGKYNFQFHWALCEIIEKHKQQKEYALLIEHHEDVVIAEGLNASSATFEFYQVKNQSATFTPANLTKRKKGNNEKLKSSVLGKLLESCINTQYDNRITKIGLVSSSGFSLKTDADLTLDVIKVGDITEEDLTTLTDNIQSELGITVLPENLQFIVPNIQLKNQEDYVLSHFARLVDKLFPAALCNPVNIYRSVIDEMGRIGRIEYDYKEWTRLLENKSLTSTQVHDVIIQHTKHPCVDDLKSNFDDLARDLGWKSRQKRSFKSRLALIALSRAGFMTSLDIELTNLFQASHDKVAEEDYSDDTTYLEALRSQAITDGLLARVNNEDELLLEIIYCLLKA

SEQ ID NO: 91433 - protein, 575 aa, Vibrio fischeri SR5
MKGLQFQRLVLLSDSKRTANQFSFPKRFNLVTGNDNSIGKSTLVKSLFWAIGCDPQFDVNWKSNDVKAILYFTVNQNKYVVSRYADGIYFGSEGEPLTKYSKVTGQFAEDFAKVVGFDLMLANKQDGIDCPPPAFYFLPFYIDQKKSWDEPWNGFEKLQQYANFKQNLIKYFCGYLPKEHFDLEEEIFEEKALEKEANQQVERITEAVTLLEEIAPEQTIAITPEEFEGIQHEIEEELAAFSSSQSNLYKLQSLLANEIHELEQQLVIANTSAKELEYDYTFAVENIPTDSLECPLCGVEHDNSLLSRAGLLADKEGIEQQADKIKSLLEKKMEERTALNQELDFVTSEIERINDKYLNEDAEEQQSDEHKVHFEQAIHAVSQHKVNQNVTRKKEGFQLKSKQANDNQKELKKAQRKLVKKAARDELNELFMGNLVESINSLSARGVNLDGVKAPMNYKKILGGGAAEGTRGTLAYQLAVLRQIDYANSCEIAPFVIDTPNQQEQAKHRYDQVMDVLNENIPKGYQVILCAMDDVALDNYKQDAHIIKLDNNRLLQHEPYTQLRTEYEQVVLSNR

SEQ ID NO: 91434 - protein, 434 aa, Vibrio harveyi 1DA3
MCVLCRFLFSKFDCIGTCCYAICFNRGNCIAICIYLILKINLRIGLFMSKELHNETPREQDGRDSFERYRAQVRSASIAALTILEGSEVDRVYCDLHDDFVKRRSDGGGYDFYQVKTKSKQNHNWSLNEVFGIKSRGNTQSPEDIENSFASKLLLHTIVFDDNCNSVIFQTNINNHDHIESVIKDISSGEFTNKHTKILIDSFNECISKENLYSEDEIKKRLKKLKFETDVQYLKSKNNNFDAIVRDKIYRYSEVDLDYFDTQEIIMKLLDLVSKKSSGKIDEYTLENIENQASIAIDDLLSILSISKEAYESLKNGGDPKAIKNVSIIQRSLQVVGVEDETIKYCSKCKLDWDEWYRNNRHILFGLDLITITDKIKYVLKENLKLNGGYVNLRELSKPIKDVLKDLEDEGILFGLNGDLILGAIFSEIVRMKS

SEQ ID NO: 91435 - protein, 587 aa, Vibrio harveyi 1DA3
MKLISIRIVGKGVSGWFSDELKFGDHITHLWGPNGCGKTPIVQSVAFCLGYPCVFREDIYKYCHYAILKVEVNNDILKIKRKIESNLEIEVIEPNGGVQTFFNEDEYSDYLFSILGLERPSIVSIGNKITKPYLSTLLPIIYLDQDDGYRKHYYSKSNFIKDQYEEIIRVLFSLPAKNSFNKKKKKLEEKGKLDLLDREVNNKFKRLETQRAVVESVNKTSQEIHDEIVIFETQLDDLKNSFSTHDESLSALDKIISSHRKAINKINSEIEDLRNRNRGIDKIISEIKTEIETLNLNEEARRVFLNSGEICVSSNCKLFSKSSDSYSKNLLYLKDQIKDLNINSKSDDDKVVELIERKKVIENLISEIVKERNEAINKSEAHFLVDTISEIKNTLFELQSDYEKIDILEKYESQYFDALRRRNITLDNYNSLSNDRVSIPNIIKLKSRLKECLIKWLTSIRIKNINLDIRWKNDFIPIFGTETIEQIKGSTRARAVIAYHAALMEVLLEQEENNINFVIFDTPKQHEIHDDDLDNFMSDMKKLCDKHSLQFIFSTTEYKYFGDEKDKKWVPKYPGLEQNMFLTTKGE

SEQ ID NO: 91436 - protein, 357 aa, Vibrio parahaemolyticus 3259
MADNPLAEAQRESAGASTFGKYNFQFHWALCQIIEKHKQKNEYALLIEHHEDVVIADSLDASSATFEFYQVKNQSATFTPANLTKRKKGSKEKLKSSVLGKLLESCINTQYEDRITKIGLVSSSGFSLKTDGDLTLDVIKVGDIAEEDLTTLTDNIQSELGITILPENLQFIVPNIQLKNQEDYVLSHFARLVDKLFPGALCNPVNIYRSVIDEMGRIGRIEYDYKEWTKLLENKSLTSTQVHDVIIQHTKHPCVDDLKSNFDDLASDLGWKSKQKRGFKNKLVLLALSRAGFMTSLDIELINLFQASHEKIDEESYSDDTTYLEALRNQAIADGLLARVNNEDELLLEIIYCLLKA

SEQ ID NO: 91437 - protein, 411 aa, Vibrio parahaemolyticus 3259
MKGLQFQRLVLLSDSKRTANQFTFPKRFNLVTGNDNSIGKSTLVKSLFWAIGCAPHFDSEWKSNDVKTILYFTVNQNKYIVSRYADGIYFGAEGSSLTKYSKITGQFAEDFAKVVGFDLKLANRTEGIDCPPPAFYFLPFYIDQKKSWDEPWNGFEGLGQYARFKQNLIKYFSGYLPKEHFDLEEEIFEQKSIEKEANQQVVRITEAIDLLKEIAPEQTVAITSDEFQSIQREIEEELASFSSSQSNLYELQSILANDIHELEQQHLIASASARELNEDYTFAVENIPSDSLECPLCGIEHDNSLLSRAGLLADKESIEQQADKIKSLLETKYQERDDLNQEISFVTAEIERINEKYLKEDSEEQQTEFEQAIHAVSQHKVNQNVTQKKAVSSNQNKLTSCKRKLRRNKIS

SEQ ID NO: 91438 - protein, 357 aa, Vibrio parahaemolyticus EKP-008; identical to SEQ ID NO: 91436

SEQ ID NO: 91439 - protein, 411 aa, Vibrio parahaemolyticus EKP-008; identical to SEQ ID NO: 91437

SEQ ID NO: 91440 - protein, 362 aa, Vibrio parahaemolyticus
MGLAEALISIPQSERGGEIAQRGFDYQTCWALSQMLEYELDEKNYVFIFEYHDDVLILDDEVSPTDLTFAQVKTREKHWTASILSSSTKKKPVSIIGKLFIHYKNFAEYSPKLLFVTNASFNLCEENGGKSCFGANEVKKEHQTSFKKAIKDQVELDDSSIDLSVMRFVQSSLSLDDHITHLKGKLCDFLSKKFGDSTNLSVNALASLLEQACRDKSKVKSADIIDFSDLISRKGFSSEALNGVLDSLNVSNSLKPDWNKASPLFTDLGKTSLQLIILQATFSQVCIELNQNTKNPSTVYLEYAISLYDEASVHSDLKLYVTETMHKIDALCPDYALTLKSGKKECIVVYSVIQKLFEGGEE

SEQ ID NO: 91441 - protein, 550 aa, Vibrio parahaemolyticus
MKSIYFKSAHILSLRDKKGFSFKFSPDINIITGENDTGKSSFIKSLYHTLGADIRLDKKWKEDDFVSKVVICVSNRDYAFLRHEKRISIFDITEGQEHHLVTSSSRTDIALTVRDIFDFNLELVTKSNLVQGQAQPASLYLPYYIDQDNGWGKVLDSFSSLAMYKDWQNNILNFHTGVKPKEFYTLQGKINLIDIDLVEIRATLKALEAAKKRFEESFGRVLFDVDVQYYEELLERFLHKCQDLHKEETEYRIKLIEVLSLRDELVAEIEESKRQLDENNIDSLPPSAGLEARYAVLEHRDKLLQIIPELYEQKSVYDDQITKIKEDLKNAKRLSSELKEMLQEVKEQLSLQDVINSQASKQVEVTFDEQINELLQKIGELDVARTKLSKEIAKFEDKKRAKEINDKFKESLKFAQTELGIKDPKVGTILQYGPISKSETGSRAPRAILAYHYALLKTIEDKSTSPMLPVVIDSPKQQDPDPRTTKKLFDLCIDGLSTNCQLIIGSVSLERETNQFKTLTMTDKYSLLKPELYNQVYQEIMPLYQKAALS

SEQ ID NO: 91442 - protein, 363 aa, Vibrio parahaemolyticus VP766
MGQGINGGVEAGRGFSFQKCAALCLLLDDFPSFGKRKYFLAFEHHDDFLFAFYDGNDELDEVKAYQAKKKSLSSSWGTNDKLAEILCKLTMTGQRISQDNSINKSKNYSHRLSFISNAEIKLTNGKAGKKKKSISVKEDTTPIRFLTLDKEIQIKLEDIINSNAEPNDISEMNGLEFANISLNHNHKVNKDYLVGKMTSMFGDKISDYVAALDVLMTLFTDSELEFNKNGLPELSHSAKWVAKSQIENAMDVLTSQKKAYNLWRKYAEVLGKNLKIKFRYSKNYEEHIDNCFDGFKSLRNSELLKVKSLVKEHKDIVEDEYNECDGIISLIEYIRSEYKISLESHIIVFAVIASYVEMEDICG

SEQ ID NO: 91443 - protein, 582 aa, Vibrio parahaemolyticus VP766
MVKVNYNSLLVFNINKDKSFYTTFNNGVNIVYGRNTSGKSTLIQIINYSMGINDAKDNLSDILKEDVVIRLTLTLSVNATCKEVVFVRKNDSLIVKVEGEPIKRFDGVSGNTSYEYRKYKEFFANLLGFDLHLESKGDVSLAPLEAAFLPFYISQSVGWVYLRESIGNYRFYKNFKEDYLDYCFGISNQSDRAKRYQLEEKRKEYKSEIKFIEEYHKKHPELEISKRISQRFENGAYEFIDDFNNINTSLIELERQHIELVNKKSSLLMRNSVLRKVHSAQNKQRPKLDSCPVCEQSLPSTVEALYKYNQELNDTVHQRSVVDEKLKSVQSTINSVEKKLSEGRRELVGKYKVLQKLKMLNITFDTWMEYESIRRLSEELDLKLNKVQRKLDLVLGELKGIDQSDIERERNIVSRLFLQKFKSNAKALQATIPMSPRYRDVYEINSFPAQGVELHKLIMAYHFSFWELLKDNEKMHRLPFVLDAVFKEDIDEVSRETIFNFLSTKNSRDEQIIFAVADVKDNQPAPTSRTHFIEEVNEIYFSSSANLICIGNAEKQRAFLSEAPTELELDLIEDTLEISEAY

SEQ ID NO: 91444 - protein, 276 aa, Vibrio parahaemolyticus 901128
MFDDNCNSVIFQTNINNHDHIESVIKDISSGEFTNKHTKVLIDNFNECISKGKSYSEDEIKKRLTKLKFETDVQYLKSKNNNFDAIVRDKIYRYSEVDLDYFDTQEIIMKLLELVSRKSSGKIDEYTLENIENQAGIAIDDLLSILSISKEAYESLKNGGDPKAIKNVSIIQRSLQAVGVENETIKYCSKCKLDWDEWYRNNRHTLFGLDLITITDKIKYILQENLKLNGGYVNLRGLSKPIKDVLKDLEDEDILFGLNGDLILGAIFSEIVRMKS

SEQ ID NO: 91445 - protein, 587 aa, Vibrio parahaemolyticus 901128
MKLISIRIVGKGVSGWFSDELKFGDHITHLWGPNGCGKTPIVQSVAFCLGYPCVFREDIYKHCHYAILKVEVNNDVFKIKRKIESNLEIEVIESDGSSQTFFNEDEYSDYLFSVLGLERPNIVSTGNKTTKPYLATLLPIIYLDQDDGYRKHYYSKSNFIKDQYEEMIRVLFSLPAKNSFNKKKKKLEEKDKLDLLDREVNNKLKRFEAQKSIVESVNKTSQEIHDEIVIFETQLDDLKNSFSTHDESLTALDKIISSHRKAINKINSEVEELKNRNRGIDKIISEIKTEIETLNLNEEARRVFLNSGEICGSSNCMLFSKSSDSYSKNLLYLKDQIKDLNINSKSDDDKIVELIERKKVIENLISEIVDERNEAINKSGAYVLVDTISEIKNTLFELQSDYEKIDILEKYESQYFDALRRRNITLDNYNSLSSDRVSIPNIIKLKSRLKECLIKWLTSIRTKNISLDIKWKNDFIPIFGTETIEQIKGSTRARAVIAYHAALMEVLLEQEGNNISFVIFDTPKQHEIHDDDLDNFMSDIKKLCSKHSLQFIFSTTEYKYFGDEKDEKWVPKYPGLEQNMFLTTKGE

SEQ ID NO: 91446 - protein, 362 aa, Vibrio parahaemolyticus EN9701121; identical to SEQ ID NO: 91440

SEQ ID NO: 91447 - protein, 550 aa, Vibrio parahaemolyticus EN9701121
MKSIYFKSAHILSLRDKKGFSFKFSPDINIITGENDTGKSSFIKSLYHTLGADIRLDKKWKEDDFVSKVVICVSNRDYAFLRHEKRISIFDITEGQEHHLVTSSSRTDIALTVRDIFDFNLELVTKSNLVQGQAQPASLYLPYYIDQDNGWGKVLDSFSSLAMYKDWQNNILNFHTGVKPKEYYTLQGKINLIDIDLVEIRATLKALEAAKKRFEESFGRVLFDVDVQYYEELLERFLHKCQDLHKEETEYRIKLIEVLSLRDELVAEIEESKRQLDENNIDSLPPSAGLEARYAVLEHRDKLLQIIPELYEQKSVYDDQITKIKEDLKNAKRLSSELKEMLQEVKEQLSLQDVINSQASKQVEVTFDEQINELLQKIGELDVVRTKLSKEIAKFEDKKRAKEINDKFKESLKFAQTELGIKDPKVGTILQYGPISKSETGSRAPRAILAYHYALLKTIEDKSTSPMLPVVIDSPKQQDPDPRTTKKLFDLCIDGLSTNCQLIIGSVSLERETNQFKTLTMTDKYSLLKPELYYQVYQEIMPLYQKAALS

SEQ ID NO: 91448 - protein, 362 aa, Vibrio parahaemolyticus; identical to SEQ ID NO: 91440

SEQ ID NO: 91449 - protein, 550 aa, Vibrio parahaemolyticus; identical to SEQ ID NO: 91447

SEQ ID NO: 91450 - protein, 387 aa, Vibrio parahaemolyticus
MSKELHNETPREQDGRDSFERYRAQVRSASIAALTILEGSEVDRIYCDLHDDFVKRRSNGGGYDFYQVKTKSKQNHNWSLNEVFGIKSRGNTQSSEDIENSFASKLLLHTIVFDDNCNSVIFQTNINNHDHIESVIKDISSGEFTNKHTKVLIDNFNECISKGKSYSEDEIKKRLTKLKFETDVQYLKSKNNNFDAIVRDKIYRYSEVDLDYFDTQEIIMKLLELVSRKSSGKIDEYTLENIENQAGIAIDDLLSILSISKEAYESLKNGGDPKAIKNVSIIQRSLQAVGVENETIKYCSKCKLDWDEWYRNNRHTLFGLDLITITDKIKYILQENLKLNGGYVNLRGLSKPIKDVLKDLEDEDILFGLNGDLILGAIFSEIVRMKS

SEQ ID NO: 91451 - protein, 587 aa, Vibrio parahaemolyticus; identical to SEQ ID NO: 91445

SEQ ID NO: 91452 - protein, 357 aa, Vibrio parahaemolyticus
MADNPLAEAQRESAGASTFGKYNFQFHWALCQIIEKHKQKNEYALLIEHHEDVVIADSLDASSATFEFYQVKNQSATFTPANLTKRKKGSKEKLKSSVLGKLLESCINTQYEDRITKIGLVSSSGFSLKTDGDLTLDVIKVGDIAEEDLTTLTDNIQSELGITILPENLQFIVPNIQLKNQEDYVLSHFARLVDKLFPGALCNPVNIYRSVIDEMGRIGRIEYDYKEWTKLLENKSLTSTQVHDVIIQHTKHPCVDDLKSNFDDLASDLRWKSKQKRGFKNKLVLLALSRAGFMTSLDIELINLFQASHEKIDEESYSDDTTYLEALRKQAIADGLLARVNNEDELLLEIIYCLLKA

SEQ ID NO: 91453 - protein, 570 aa, Vibrio parahaemolyticus
MKGLQFQRLVLLSDSKRTANQFTFPKRFNLVTGNDNSIGKSTLVKSLFWAIGCAPHFDSEWKSNDVKTILYFTVNQNKYIVSRYADGIYFGAEGSSLTKYSKITGQFAEDFAKVVGFDLKLANRTEGIDCPPPAFYFLPFYIDQKKSWDEPWNGFEGLGQYARFKQNLIKYFSGYLPKEHFDLEEEIFEQKSIEKEANQQVVRITEAIDLLKEIAPEQTVAITSDEFQSIQREIEEELASFSSSQSNLYELQSILANDIHELEQQHLIASASARELNKDYTFAVENIPSDSLECPLCGIEHDNSLLSRAGLLADKESIEQQADKIKSLLETKYQERDDLNQEISFVTAEIERINEKYLKEDSEEQQTEFEQAIHAVSQHKVNQNVTQKKESCQLQSKQANELQKQIKKEQNKLVKKATRDELNELFMGNLVESINSLSATGVNLDGVKAPMDYKKILGGGAAEGTRGTLAYQLAVLRQIDHANPCEIAPFVIDTPNQQEQAKHRYDQVMDVLTENIPKGYQVILCAMDNAALDNYKQDAHIIKLDNNRLLLHKPYAQLRAEYEQVVLSNS

SEQ ID NO: 91454 - protein, 362 aa, Vibrio parahaemolyticus; identical to SEQ ID NO: 91440

SEQ ID NO: 91455 - protein, 550 aa, Vibrio parahaemolyticus; identical to SEQ ID NO: 91447

SEQ ID NO: 91456 - protein, 362 aa, Vibrio vulnificus
MENLLQAEQTKKDPGASTFAKYWYQYNWALVKFLEECDSRDNCSLSIECNEDVMIIDDCTSNKTKVDLYQVKEKSSSKNISAATLAYGNSTKSIISKLVDNLDRELLRERINRLAIVSSVPIKMTLKDNRDSTVLNSFKWSDISDSDSKILMQSLQKDLKKEEIPLFIEFIKGIEGVNESTHSSIALKKLVDYIDKIEPNMACQPRVIFEVLRSELVRIGTDENIYTVWDDFIKSKVITSKNLKDIIINRLVPILGSNFESVWSNIKTSEYFNDLNFMDRIKFKDSCSKYYNLKITSTDYMVFNDVEAEVSRVCERTDIETYCDFVTILVKNLNSNGLILDYFRNMDISLYSIANVEISEKL

SEQ ID NO: 91457 - protein, 552 aa, Vibrio vulnificus
MKKLIFQELIIVSDLEKSAGIFQFGPKRNLILGASNKVGKTSLCTTLMWSIGCNVEFPPNWKKLGIKTILKFQVDSATYYIKRSDKKLSIIFPSGSEKEYDKVTGDYSADIGDILFSPLYMKIKGGSPSPGVPSAQFLASFIHSDSGWGELFKSFKDLNMYSPSEKKYVLEYFLGIRDVSFFTKRKARVDLEGNIEASKQKLNRIMIVDNDIKSLLNKGESENVNVFDIDPLLEERSFVLANIIKLKSEKYDVNKRIGLIERAEHELFEDYQFATNNVEGRLITCPTCGVIHENDIVNRFNIINERDSLKNHRMSLLKDLNEISEYISREQRKIDEINAKISVNERFYNLSRPTEKDIYSHGTETVIESVFSELVMLENKSIARFEEELASMPKFSTATSKYRDNASNIRELFSTSLIESLHDFNVLDANEELVREDPYAKIHVSGSDISRTTLGYYKTLNDFKLKNCDSVILPFVCDSPMQQEQDDKNIDSVVDLIQAWSEQQFFLFGKDYPSYEKLKRDPDTKLIYLENNRRILSKEDYPSLASYWSSSE

SEQ ID NO: 91458 - protein, 357 aa, Vibrio mimicus CAIM 602
MADNPLAAAQREFAGASTFGKYNFQFHWALCEVIEKHKNNKEYALLIEYHEDIVIADSLDAKLAKFEFYQVKNQGATFTSAALTKRKKGTNKELKNSVLGKLLSSCINTEYEDRITKIGLVSSSGFNFKVNKDLKLDVLKVGDIAEIDLAKLTENINAELGIDVLPEHLQFIVPEIQLKNQEDYVLSQFARLVESLFPGALCNPVNIYRSVVDEMGRIGRIEYDYKDWVRLIDKKSLTSTEVHKVLSLHSSHPCVDDLKSDFDDLANDLGWKSKKKRTFKGKLALLALRRAGFMSALDIEITDLFKQSHIKIDEDNYNDDSTYIEALLQQANDDGLCAKVSNQDELLLEVVYCLLKV

SEQ ID NO: 91459 - protein, 578 aa, Vibrio mimicus CAIM 602
MKGLQFQRLVLLSDSKKLANQFMFPKRLNLVTGNDNSIGKSTLVKSLFWAIGCDPKFNEDWKLLDVKTVLYFKVNEKEYVVSRYVDGLYFGQKNSPLQKYSKVTGNFAMDFAREVGFDLLLENKIGELDCPPPAYYFLPFYIDQQKSWDEPWNGFERLQQYGNFRTNLIKYFCGYLSRKHFELESEIFEQKAADREATQQAERISEALSVLEEAAPEITVAVTQKELESIQVEIEVELKEFSKHQTNLFDQQSVLVNEIHDLEQQHILASTSARELEEDYIFAVENVSSDSLECPLCGTEHDNSLLSRAGLLADKEGLEQQANSIKNALVEKYRQREELVQELEFVASEIDRINEKYIKEDSSEEKSDTQCAFEHALYSVSQKKVNSSVLQKKEHFQFQSQKAKDNQKDIKKEQRKLLKKKEKDDLNDLFIGNLVESITTLAATGVNLNGVKSPMDYRKLLGGGAAEGTRGTLAYQLSVLRQIEYAGNCQIAPFVLDTPNQQEQAKHRYEQVIDVITENIPRGYQVILCAMDDNDALAAYKKEAHVIELDDNRLLQGELYEDLRSEYENEVLNNTATE

SEQ ID NO: 91460 - protein, 358 aa, Plesiomonas shigelloides 302-73
MVNSNSGVEGGSGYSFQRCCVVFLLFEDYEKLNIEDYFICLEHHEDFLFAFLDENRHLKQIDTYQAKKSRDDWKTDSDLCEIIGKMTMVGKELVNDPHDKSNNYQHTLNFLTNRNILLTSKQEKGTKQDKVKIQVSNRRKNHSDLTEQIKKNIEARICQSILEITQLKNVYFQYIDLAQSYKSWQRELKGLSMEHFGQEVNDHEAVISTLMRLLEEAEQTYNDNNKVLLSDLSKRVTKDKINETFNMFTVSKKSFDFWRKYSDQISTQLELKLPIRRRAQELLENCFDFFKDLQQVEYRKIYKFVETRTDIDENHICETDCIVDLYHCYQREFQPRLENHMVAFAVIAAYVETRGMYV

SEQ ID NO: 91461 - protein, 190 aa, Plesiomonas shigelloides 302-73
MSKLNLKSLLVYSPNDEKGFYTEFSESVNIIHGRNTSGKSTLIQSIIYAMGINDSKDNLNDINSGDVFFRLDCVLEKTGESCNLVFIRSDDTLVLQKGNEPAIRFDGINSNNSFEYGRYKELLSKLIGFNLVLQKQSELVSAPLEAALLPYYVSQSVGWVYIRESIGDYRFYKDFKFDYLDYYCGIESGH

SEQ ID NO: 91462 - protein, 348 aa, Aggregatibacter actinomycetemcomitans HK1651
MLNKLNKIKQRETSGSDTFKNYDYQYHWAIYTLLENSRENDDIAVLVEFHEDVILVENVSSENNQFHFFQIKANDKSLTLSDILRKENGNKSILDKLTLGKEYLEILDNIKSIKLVSANGFSSKFCANESNFYELCDKDKKKIEDNLMLEIDKNSFLSKLYFSKSKLPKIGFIQTVKGILSEIIQEIHPDKRTNVNAIYLVLKDDLHDKGKKRLTDKEDPLQEKGMTFSTVKEVINRYTDIEDDNLTSVLDMLNNTSYAIIEKQKIKKELLKYSTHHLNSGSIQAQIKLDILNSNILDDLMCSNNKQLTEIINNFCSTLELKYGTISTVQMIKSGVLYELSRYIRETA

SEQ ID NO: 91463 - protein, 536 aa, Aggregatibacter actinomycetemcomitans HK1651
MKRLIIKQLAILSKDKDAGNLFTFSDGVNFILSDKNSAGKTTLLNLMYSALGCVVKFKNEWINSFIRLDIAIEGNSYSLYKTPNEIYYIHDEKDLVKYENESDYHKRLSEILGYKIYLKVHSGTPKLARPAHFFLTSYISQAKGWNSFFPNSFEKLGEFRAFQPDLVEQFCKVKSDKELENEEEFNRVKDNLKQKTNEKQVLNLTKENLEKETNFDINKLKENVENYEKSLNLLQDELSNLVVERQFLLNEINFVTPTVKEVDEDYQEARMHGAKIECPYCGTIHSNTITEKSELFFIKTKLEDELINNQSRIKEIDIKISETEINIKELSELKSGIDHLISDNTKHLRKAITANEIFGIISDLENEITQLEKRKKSINKIKNRNRKEYEEHREAVNDFFVTKLKYYADRLSIVFNNYDEIQKVTDYNKVLNAVKGGAADSNRTVLAYYLAIYATAINFNTDILPPLVLDTPNQNEQDKENYKSIIDTLIKENNKQIIICLIRSEYSEKLKPVNKIEVNRLMKMGEYHKFFDELEI

SEQ ID NO: 91464 - protein, 348 aa, Aggregatibacter actinomycetemcomitans HK1651; identical to SEQ ID NO: 91462

SEQ ID NO: 91465 - protein, 536 aa, Aggregatibacter actinomycetemcomitans HK1651; identical to SEQ ID NO: 91463

SEQ ID NO: 91466 - protein, 362 aa, Bacteroides fragilis str. B1 (UDC16-1)
MNNKNTNPLFAPQKDKAGGWTFDKYDYQYHWALYEVLSRHKERKEYAVFIEYHEDVIIADSLDVDCAKFDFNQVKTTNVAYTPHQLTIRKKKKKVAGSSVLGKLVSSIAREDIGSQISYANLVALNGFNLELKDKGVCLKKIQLDDLSENHYKVIEEAIIKELNISSLPTNIQFIIPTLNEHNYEEQVIGMISKLVNLLFPTSQCNSEEIYRSLIDELHKKGKVTYDFSKWNDFLKEKALTSITVSNTIANFTSIKDETTVEMGFNNICNELGIKSIYKAKLHRAFNRYRQLRISNNSTNQIDIKKEIINLIHRKMDAISDDESFENLLEFVISNIGSDIKSQFSDDTDIKGAIICEFVMLD

SEQ ID NO: 91467 - protein, 566 aa, Bacteroides fragilis str. B1 (UDC16-1)
MRSLKFKQLLLLSDTNKLANRFNFGEGRNLITANDNTVGKTTIVKLLLWGLGCEPALDSKWASQDCKVIIKFSIEDNIFFVRRYKNLIAIKREEDKVWMQFDKITGGYAMKFAELLSFKALLPNRATGMLETPPPAYYFLPFYIDQKKSWSTAWDNFESLGQYENWKQTIIKYHVGLLSPKHFELSYKKMEIQNRSKNVKENIEKVDVALEIVSKYVPNLTIATIEENKFKEFTDEIRIELKELQTQQEKLLDNFTQNQSEKSYLEQQKAISERIIDELEKDYLFAVENVDNTIECPLCGTIHENSIVYRSSILVDKKQAKNQLEKIEKCLDKVNNTISNINNKLTTVRNKITSINAKYITINDSQVSLNNIIENIAGNSIKDLAISDKEEMIITKISLDKDARNLTKEIKGLITKEDAEKISNSFVAILTKYVEIFGAESINFAEIKSPLDYSKIIKEGGAAEGTRAILAYYLAIFTMVTKFGSEVVAPLIIDTPRQQEQSDFNYEKIVSFLTTNVSSEVQILLCAMDNPILESFKENANIIILDNTKLLSAKMYEEVRKEFLSL

SEQ ID NO: 91468 - protein, 392 aa, Oxalobacter formigenes OXCC13
MTKLIKLHEIEPRENNGRDTIARFRAQFRAASIACLSILNGKDTDRVYCDYHDDFVVRKKSADNFTYDFYQVKTKAKRNYQWSVSDILALNERKQQKNKRTLEGVRDSFVGRLIIHSINFEDTCNKVTFMTNVQLKDAVENIISELESDSFENKHLKFIVDNFNDVFEIKNPITVDVIEKHLKKLVFMPGVSYLDPDSTGLTEEARSAIYHYSEIDLTQSEIEKIIKNLIDLVEKKSFARINDISEVELDNKAGIGIDDLLTILSISKNAYYSLSNGGDTKALKNASILYRKLKESGADEEMINFCAEQKVNWDVWVREKRNIIAEFEFNFMMASLSRICKKWHQNYYNLDILKKEIEELHIDLLDKKIDESITVSLLLGGFFSVLVRGEAR

SEQ ID NO: 91469 - protein, 587 aa, Oxalobacter formigenes OXCC13
MKLLSLRVNPRGEHGWKSEILNFGSDITFLYAPNGRGKTPIILSIVFCLGYPIKFREDISEKCESVSLVFENKEKIYSLTRVIDRNFFVSVIQNDNEIIEFDTESEYSKFIFNIAGIEYSNLISTSNKKTQPYLSTFLPLFYLDQDYGYQEYYKTAQANFIKDQFSEMFRLALGFLPKNSFDSKKNLLKLNETLKMLDESIVNIRGMIENIEININDNKTEKYLADEIEKRREDLSKLRTTRDIKGSVLNNLEELLVSKYSDVKNVQKQIYSYQSRVNGIERIKNEIEVEIDTLNLNEESRKLFASFKDICSNIDCKLFTVSSESYAKNLLYLKDQIKDLESNSHFINEKIKELSNFLNNIQSNISELEEQIRNIELRDDIKSLVDVIGRLTEEIFELERERKSIEVVNKYKTSYFNKIVERDKILDLIGSMSANVGVSDIEYTKIRLKFKEFIIKWLDILGTKNISRDIIVENDLKIIFGKEKINSIKGSTKVRVILAVRAAFFELYLNDKNRQFRFLILDTPRQHEIHEEDINNFMINLKNLASDKDAQIIFSSTSYHYNIDNNDEKWEPAFNRDNTSMYLGNLN

SEQ ID NO: 91470 - protein, 333 aa, Fusobacterium nucleatum subsp. nucleatum ATCC 25586
MPKDLSGSITKNRFRLELLWGISKVIDIHKEGKDYTIIFDFKCDIEIHRDNELFFYQIKTKKTGSYNEKDLCNKKNKEKNSILGKLYALYSPEHDIKLAIVCNKQLKIKRKDIDFSEQCFAKLDQGIIDYIKKELCKELNLKTINLNNVFYIFDNMDLLNPENAIRGKLIKSFEEIEGEEPQNPNALYRLVYDTVKDKASYELDLDKYENVIKEKGITRVEFEKILNAHKKDSKNGINETKEYINKLPLNKSRKYNMALGNLFAIKKTKLLESLKIKIYKYIEEHENDFVNIDKSIFLLSKQFDREFSKEFTNEMKIVQYILIYHIYASGGEL

SEQ ID NO: 91471 - protein, 560 aa, Fusobacterium nucleatum subsp. nucleatum ATCC 25586
MRVIFNEIYIFDINLKIGYSTDFKKGINIVTSSEVDGTDRGKSVLLKSLYHALGADAHFDSKWSEKDKIYILKFQVEDKNFSIYRSQKLFKIFDKDSKLIFTTIHREELSEFLGKLFNFSIFLPNKKTEQLVLAPPVYSYLLNFLDQDKYSGTNFDSFKNLAQFSNFKLNVLYTHLGVYDKNYFELVKKKEALENEIKNKKEEIATFNKMREKTTLMLGGFSCPETNEALENELNIKSKKYSDLLNEMNLTRNTLIDLRNQLKEYEIILEQLSKFKIIQEKEINTILKSRICPECNTKLENTIEIRSKKYNYIEDVLNLKDNINIEKNLLKEKIQLNENSYSKLVTLLEKYDEEIKNNKKEIDNYIKFRGLNNLVDKINADILSEVKKENEAMELLKPIKKQLKNANEKTKKIEDSYYNMIDKLKIKFNLNELSSEDYKKLSKNFCAGGSNKPLSTVIWYLTLNVLKEKYNSNTIKFPMIFDSPNNAETDQEKKEAIVQYILDESSNFEQLIISTIGFSTDKYKVKFDLNIKVLKNEKYGLLNKESYNKNYEILRYMNDA

SEQ ID NO: 91472 - protein, 342 aa, Fusobacterium nucleatum subsp. nucleatum
MDRSQYYMNLPKDLSGSITKNRFRLELLWGISKVIDIHKEGKDYTIIFDFKCDIEIHRDNELFFYQIKTKKTGSYNEKDLCNKKNKEKNSILGKLYALYSPEHDIKLAIVCNKQLKIKRKDIDFSEQCFAKLDQGIIDYIKKELCKELNLKTINLNNVFYIFDNMDLLNPENAIRGKLIKSFEEIEGEEPQNPNALYRLVYDTVKDKASYELDLDKYENVIKEKGITRVEFEKILNAHKKDSKNGINETKEYINKLPLNKSRKYNMALGNLFAIKKTKLLESLKIKIYKYIEEHENDFVNIDKSIFLLSKQFDREFSKEFTNEMKIVQYILIYHIYASGGEL

SEQ ID NO: 91473 - protein, 560 aa, Fusobacterium nucleatum subsp. nucleatum; identical to SEQ ID NO: 91471

SEQ ID NO: 91474 - protein, 356 aa, Cellulophaga lytica DSM 7489
MSDKTNQNPLLAVQREKAGSETFEKYSYQYHWALYRVLNDHIKANEYAVFVELHEDVVVSDSLDASKAKFEFNQVKTTKGRFTANKLVHQKKNKKCVLGKLISSGFEKPFKDRITELNLVALNDFSLTLKEEGLSLNKITLNDLSDAQFKELEDEIRKEMGISSLPSNIQFIVPELSEKNFQNDVIASIAKLVSNLFPNSHCSPVEIYRLLIDEINRKGKVTYDFTKWNDLLINKALTSITVTEVINSFTSIKDEAKIEVEFHTICSEIGLNSINSKLLKRPFDRYRAKRISNSSTLQLDTTNFFANEIQLNLDKGIDDLGKLIDNVKKQIPKKIEKQFNNELEIKSAIICEYILL

SEQ ID NO: 91475 - protein, 586 aa, Cellulophaga lytica DSM 7489
MLNLKFKRLLILSNSTKSANQFEFSETLNLITAVDNSVGKSTLVKLLFWGIGCEPTLDTNWSTTDSKTIVEFSVDTNDYTVKRYKNQISLKIKDEDFVDYEKITGEYSQKVAEILEFKALLPNRSTGLMETPPPAFYFLPFYIDQKRSWSKAWDNFEKLEQYKNWRSTIVKYHVGLLTPKHFELESKKAEKKDTKNLVQSQIERIETTLDVVEEYIPHITNATTETKEFELLTEEIKVDLKNLQEEQEKILSQLTSLNGDRVYLEQQQIITEKIISELDKDYKFTIENIEEDEIECPLCGVVHENSIINRTSIMTDKSQAENQLQSILTELDKINKKIDNANFKLDKARESILKINEKYVISEELPVSKHIENTNSVKRDDIEIKDFNFNQIIENIAGNAIKKSVLNDKIEKVNSVDTLKKDIRQLGKEQKGLITLEDIEKINNSFSSIFSDYIELLDAEAVNISSIESPLDYNKVIKEGGAAEGSRAILAYYLSIFTMVEEYGNEVKSALVIDTPNQQEQSDTNYEKIVNLLTNRTSKKTQILLCAMENEHLVQFKKKAKIITLTKDRLLLKSEYEKVKKVFDNK

SEQ ID NO: 91476 - protein, 359 aa, Flavobacterium johnsoniae UW101
MADAINPLFESQREKAGSQTKGKYNYQYHWALYKVLSEHQLRKEYAVFVELHEDVVICDSLNAEKAKFELNQVKTTSKNMSHNELTKLKKGVKGSSVLAKLVDNTNKKGYSPKINSLNLVSVYPFTLELKQKGVILEKITLEDLSDSQVKKLEDAIEKELGEGVALPKNLQFIVSNLSEKNYQNDVIATISSLIEKMHPESYCKPNDIYRLLIDEIDQKGVVEYDFVKWNDLLNKKALTSITINNVINQFINVKDEGQVQSDFHEISKELGLTVIGRKKLKSGFERYRLSRLGNNSVLQLETSQEIIKLIRHEVGIGEENINELIENVIKKLNAKYQDPFSTIENLKGAIICEYILDNE

SEQ ID NO: 91477 - protein, 566 aa, Flavobacterium johnsoniae UW101
MSHLRFRQLLVISNSAKSANQFQFERLNLITADDNSVGKSTLAKLLFWGLGCEPEFDTTWATFDCSTIIMFSIENREYEIKRYKNSISLKEQNTIVHFPKITGDFSVKLAEIVGFKALLPNQKTGELETPPPAYYFLPFYIDQKRSWSRAWDNFNNLGQYRSWKKTIIKYHVGLLTSDYFELEIEKAIKKNNKIILNSEVDKINSTLEIVESYLPPATIATFVKNDFDDITVEIEKDLEELSIQQENVFDKYSTLQITKSHLEHQKLIAENLIQELDKDYVFAVENIPENHLKCPLCGTNYENSIENKTAILTDKSQAEDQLDNINYDLIITNRKLANTSNELNQIREKIDNLSDKYLKKEDNEHFTFSNLIESIGGHSIKKNVSESRDSKLGSIQDLDRDIRLATKSQKNLYKQDYIDDINGDFHSFLSSHIKSLDAQAVNLSQVISPLSYSKIISEGGAAENSRAILAYYIAIFSLVEKYKNEVVSPLVIDTPNQQEQSENNYSNIVSLILNKISKNNQVIICAMTNPQLAPLAQIAHIIKLDNSKLLDPKKYIDIKKIFDSWE

SEQ ID NO: 91478 - protein, 341 aa, Finegoldia magna ATCC 29328
MEYSNYYMNLPLDLAGSRTKNRFRVELLWGVGKLIDAYKLYDDYTIVFDFKCDIELHRDNGLDFYQVKTINRGNHSSKTLTKRKGNSRSILGTLYALYNPNHNIKLAVVCNKHLKIDSKEDLRKEVCLGELDKTVIDFIEDKLQEELKLSEVILDNVFYVCESMDLTNPHYALLGKLIEAFQEIKNEEPNNPNALFRLVSDTAQKKASYEMAITNYNDVLELKGISKNEFNKMLESHRKKSITGIEQVKDYIKTLFPSERRLYNQALTNLLEIDQSHELNVLKISIFEYIEGNIDKIKNENDLFNILNNVFDSEFPIEYTKYMKKVFYLMVFYLYTEGGDI

SEQ ID NO: 91479 - protein, 564 aa, Finegoldia magna ATCC 29328
MDVIFNKIYIFDILTKEAFVTCFEKGLNIVTSSNIDGTDRGKSVLLRSLYHTLGADAHFDKKWKNEDKVYILEFSVNDNIYFIYRHKKLFKVFNDVFKILFQTSTIIELSYFLSNIWDFEIFLPNRRTEKLEIAPPAYTYVMNFIDQDYYDGTYFSSFKRLGQYQNFKPDVIYAQFGIYDKNYFEHVESKQNLLERINDSEDAYRETSRMKEKVSKLLGNIVVPENLKELERELSIRTKEYDYILNSINKFRYELTNLRNEKYELEIALNQIERFKNKKEKEIKYILNTDICPECHSVLKDTTDLRSKRYNSIEDSLYIKDSIYEDIEKISKSILQIEGSYKEFLDKLESYKKNIGIAKTEIKNYSSYMGLNELYNSLNLELFNEFNLQGELKEKLENIEEDLKEVSKIKSDINKKYYDMIDREVLKFGLNELEEAQYKAINRVFCASGSNKPISTVIWYFILNDIKKIFNNKCLNLPMVLDSPKNAEMDYDKAQSLIEYILDNSSNYTQLIFSSIGFERRNFEFESEINIIELKNDKYQLLDSETFSKYKYVLENALSAQLIK

SEQ ID NO: 91480 - protein, 342 aa, Streptococcus pneumoniae GA17545
MDKEKYYMNLPKDLSGSIAKNRFRLELLWGISKIIDEHKANNEYTIIFDFKCDIELHKDDELNFYQIKTKKSGNYNSNNLCKKGKNENNSILGKLYALYSPNYNIKLAIVCNKQLKINNKEIDFPEQCFGDLDQDVLDDVREKLCTELNLNTVCLDNVFYIFDNMDLLNPEDSIRGKLVKSFVDIKGEEPQNPNALYRLVVDSVKEKASYEFDSGTYEDVVKNKGITRSEFDKMLNAHKKESKNGINETQEYINNLSFAKRRRYNTALGNILETQQSESLRLIKIKIYNYIMEHEDSLDDIESYLKEISKLFDDDFDVEFTDDMKSVQYIMIYYMYASGGIL

SEQ ID NO: 91481 - protein, 558 aa, Streptococcus pneumoniae GA17545
MNVIFDKIYIFDVVKKEAYSTEFKKGVNIITSSDIDGTDRGKSVLLRSLYHALGADSHFDLKWGEKDKVYILFFKVDDKDFSIYRSQKLFKIFNAKGDIIFTTIHRSELADFFGNLFNFSIWLPQKNTNQLVIAPPAYSFLLNFLDQDEYIGTKFNSFKSLAQFSNFKLNVIYSHLGIYNKEYFELVKQKEELELEIKSKKEEIEELIKMKDRTNLILDGFSCPETSRALENELNIETQKYSSLINEMNSVRNKLVDLRNQLVEQNITLSQISKFEIKEEKEIKTILKSKVCPECHSVLDSTLELRSKRYNHIDNALSLKDTIKTENAHIEDEILKNEGIYSNLALEEHNKKICKNKKEIKDYIKFRGLNKLIDEINNDLTINSRIIDSTKEALKPLKKEFKGVKDKMKSVDENYYYLIDKLKIRFNLNELEADSYEQLSKNFCASGSNKPLSTVIWYLTLNDLKQKFNPEGTTFPMVFDSPNNAETDQEKKQALVEYIMESSDQFSQLIVSAIGFSEKDYSINSNINIKVLENEKYSLLNSEMYVQNYELLQCMNDA

SEQ ID NO: 91482 - protein, 342 aa, Streptococcus pneumoniae
MDKEKYYMNLPKDLSGSIAKNRFRLELLWGISKIIDEHKANNEYTIIFDFKCDIELHKEDELDFYQIKTKKSGNYNSNNLCKKGKNENNSILGKLYALYSPNYNIKLAIVCNKQLKINNKEIDFPEQCFGDLDQDVLDGVRKKLCTELKLDTVCLDNVFYIFDNMDLLNPEDSIRGKLVKSFVDIKGEEPQNPNALYRLVVDSVREKASYEFDSGTYEDVVKNKGITRSEFDKMLNAHKKESKNGINETQEYINNLSFAKRRRYNTALGNILETQQSESLRLIKIKIYNYIVEHEDSLNDIESYLKEISKLFDDDFDVEFTDDMKSVQYIMIYYMYASGGIL

SEQ ID NO: 91483 - protein, 560 aa, Streptococcus pneumoniae
MNVIFNKIYIFDVVKKEAYSTEFKKGVNIITSSDIDGTDRGKSVLLRSLYHALGADSHFDSKWGEKDKVYVLSFKVDDKDFSIYRSQKLFKIFNAKGDLIFTTIHRSELADFFGNLFNFSIWLPQKNTNQLVIAPPAYSFLLNFLDQDEYIGTKFNSFKSLAQFSNFKLNVIYSHLGIYNKEYFELVKHKEELDLEIKSKKEEIEELIKMKDRTNLILDGFSCPETSSALENELNIETQKYSSLINEMNLVRNKLVDLRNQLVEQNITLSQISKFEIKEEKEIKTILKSKVCPECHSVLDSTLELRSKRYNHIDNALSLKDAIKTQNAHIEDEILKNEGIYSNLTLALEEHNKKICKNKKEIKDYIKFRGLNKLIDEINNDLTINSRIVDSTKEALKPLKKEFKSVKDKMKSVDENYYYLIDKLKIRFNLNELEADSYEQLSKNFCASGSNKPLSTVIWYLTLNDLKQKFNPEGTTFPMVFDSPNNAETDQEKKQALVEYIMESSNQFSQLIVSAIGFSKKDYSINSNINIKVLENEKYSLLNSEMYVQNYELLQCMNDA

SEQ ID NO: 91484 - protein, 342 aa, Streptococcus pneumoniae; identical to SEQ ID NO: 91482

SEQ ID NO: 91485 - protein, 560 aa, Streptococcus pneumoniae; identical to SEQ ID NO: 91483

SEQ ID NO: 91486 - protein, 342 aa, Streptococcus pneumoniae; identical to SEQ ID NO: 91482

SEQ ID NO: 91487 - protein, 560 aa, Streptococcus pneumoniae; identical to SEQ ID NO: 91483

SEQ ID NO: 91488 - protein, 342 aa, Streptococcus anginosus subsp. whileyi CCUG 39159
MDKEKYYMNLPKDLSGSIAKNRFRLELLWGISKIIDEHKANNEYTIIFDFKCDIELHKDDELNFYQIKMKKSGNYNSNNLCKKGKNENNSILGKLYALYSPNYNIKLAIVCNKQLKINNKEIDFPEQCFGDLDQDVLDDVREKLCTELNLNTVCLDNVFYIFDNMDLLNPEDSIRGKLVKSFVDIKGEEPQNPNALYRLVVDSVKEKASYEFDSGTYEDVVKNKGITRSEFDKMLNAHKKESKNGINETQEYINNLSFAKRRRYNTALGNILETQQSESLRLIKIKIYNYIMEHEDSLDDIESYLKEISKLFDDDFDVEFTDDMKSVQYIMIYYMYASGGIL

SEQ ID NO: 91489 - protein, 560 aa, Streptococcus anginosus subsp. whileyi CCUG 39159
MNVIFDKIYIFDVVKKEAYSTEFKKGVNIITSSDIDGTDRGKSVLLRSLYHALGADSHFDSKWGEKDKVYILFFKVDDKDFSIYRSQKLFKIFNAKGDIIFTTIHRSELADFFGNLFNFSIWLPQKNTNQLVIAPPAYSFLLNFLDQDEYIGTKFNSFKSLAQFSNFKLNVIYSHLGIYNKEYFELVKQKEELELEIKSKKEEIEELIKMKDRTNLILDGFSCPETSSALENELNIETQKYSSLINEMNLVRNKLVDLRNQLVEQNITLSQISKFEIKEEKEIKTILKSKVCPECHSVLDSTLELRSKRYNHIDNALSLKDAIKTQNAHIEDEILKNEGIYSNLTLALEEHNKKICKNKKEIKDYIKFRGLNKLIDEINNDLTINSRIIDSTKEALKPLKKEFKGVKDKMKSVDENYYYLIDKLKIRFNLNELEADSYEQLSKNFCASGSNKPLSTVIWYLTLNDLKQKFNPEGTTFPMVFDSPNNAETDQEKKQALVEYIMESSDQFSQLIVSAIGFSKKDYSINSNINIKVLENEKYSLLNSEMYVQNYELLQCMNDA

SEQ ID NO: 91490 - protein, 315 aa, Enterococcus faecalis JH1
MVFDYACDIEVHKDTGFDFYQVKSKKDGAVYTQGALLKKKKLEEEEKSFSILGRLYALANNQNKNIHVNLVSNKPFQDSSKKNHTTIENLDFNNLDEEVQKTIESKLQEELGSDVTPDMSKISFIYTSIDLFSPDDTLRGKTSKFFFELTGSEPNKPNALYNLLVETISEKACYELQLNCYSDILNRKGVSKDDIEKIISLYSEKTDRAVEKASIFIDTNINKPIKRLKMKTMLGKVVSDIESGNRLVLQNEELIVQSIFSNLEKYDVEETVFIDLLVSEYSKLFTIEYSEDYRYAFFLLILMKVEENIYEYSDI

SEQ ID NO: 91491 - protein, 561 aa, Enterococcus faecalis JH1
MTFNKLYIFSTFENKAKYIEFTNGKNIITTEDDVIGNKKGKSTILKNLYYTMGADCYFEDKWDVQKKISVLEFSVNKTSYIIFRQDKLFKIFDLKKNLLFKTLKRKELSTFLEKIFKFTVKLPNRHTDKLEIAPPAYFYLLNYTDQDKMNGSSFDSFRNLGEYSNFKLNTLYSHFGILDDRYYEVMKLVEQLSEQIKALDDECQLFYKMLEKIENELVDKVSFPTNFDVLQQEVDSTKNQYEKIVHSLQLTKNRLINQRNDNYEVKQELANLRKIIRKNDKDKKTINSHTCPKCHSIITDNLELKINTLNNEEDFLFLANELEKESLKVEANIYKEEKKYQQLLDTLKKYEDKLALSSKEISNVLKHKGLMEVRDKLIMDIGNSQVNLKQAQESLKEQRKILKEYLELKKQINETYYELMLNDKIHFNLEELDSDKFKKIDSNISAGGSNKPINTIVWYFNLLKVKNKFNPDAIRLPIVLDSPANAELDRDSKHTLLKYIFEESDKDSQLIVSTIGFSTSDFKEEHFDNVIELSNSKYELLNTEDYELYKELCKDLVLINE

SEQ ID NO: 91492 - protein, 360 aa, Enterococcus faecalis PC1.1
MSNEAIYMKLPFDLSGSRSKNRFRYEILWGLSKLFDIYNENESFVMVFDYACDIEVHKDTGFDFYQVKSKKDGAVYTQGALLKKKKLEEEEKSFSILGRLYALANNQNKNIHVNLVSNKPFQDSSKKNHTTIENLDFNNLDEEVQKTIESKLQEELGSDVTPDMSKISFIYTSIDLFSPDDTLRGKTSKFFFELTGSEPNKPNALYNLLVETISEKACYELQLNCYSDILNRKGVSKDDIEKIISLYSEKTDRAVEKASIFIDTNINKPIKRLKMKTMLGKVVSDIESGNRLVLQNEELIVQSIFSNLEKYDVEETVFIDLLVSEYSKLFTIEYSEDYRYAFFLLILMKVEENIYEYSDI

SEQ ID NO: 91493 - protein, 564 aa, Enterococcus faecalis PC1.1
MNTLTFNKLYIFSTFENKAKYIEFTNGKNIITTEDDVIGNKKGKSTILKNLYYTMGADCYFEDKWDVQKKISVLEFSVNKTSYIIFRQDKLFKIFDLKKNLLFKTLKRKELSTFLEKIFKFTVKLPNRHTDKLEIAPPAYFYLLNYTDQDKMNGSSFDSFRNLGEYSNFKLNTLYSHFGILDDRYYEVMKLVEQLSEQIKALDDECQLFYKMLEKIENELVDKVSFPTNFDVLQQEVDSTKNQYEKIVHSLQLTKNRLINQRNDNYEVKQELANLRKIIRKNDKDKKTINSHTCPKCHSIITDNLELKINTLNNEEDFLFLANELEKESLKVEANIYKEEKKYQQLLDTLKKYEDKLALSSKEISNVLKHKGLMEVRDKLIMDIGNSQVNLKQAQESLKEQRKILKEYLELKKQINETYYELMLNDKIHFNLEELDSDKFKKIDSNISAGGSNKPINTIVWYFNLLKVKNKFNPDAIRLPIVLDSPANAELDRDSKHTLLKYIFEESDKDSQLIVSTIGFSTSDFKEEHFDNVIELSNSKYELLNTEDYELYKELCKDLVLINE

SEQ ID NO: 91494 - protein, 360 aa, Enterococcus faecalis EnGen0355; identical to SEQ ID NO: 91492

SEQ ID NO: 91495 - protein, 564 aa, Enterococcus faecalis EnGen0355
MNTLTFNKLYIFSTFENKAKYIEFSNGKNIITTEDDVIGNKKGKSTILKNLYYTMGADCYFEDKWDVQKKISVLEFSVNKTSYIIFRQDKLFKIFDLKKNLLFKTLKRKELSTFLEKIFKFTVKLPNRHTDKLEIAPPAYFYLLNYTDQDKMNGSSFDSFRNLGEYSNFKLNTLYSHFGILDDRYYEVMKLVEQLSEQIKALDDECQLFYKMLEKIENELVDKVSFPTNFDVLQQEVDSTKNQYEKIVHSLQLTKNRLINQRNDNYEVKQELANLRKIIRKNDKDKKTINSHTCPKCHSIITDNLELKINTLNNEEDFLFLANELEKESLKVEANIYKEEKKYQQLLDTLKRYEDKLALSSKEISNVLKHKGLMEVRDKLIMDIGNSQVNLKQAQESLKEQRKILKEYLELKKQINETYYELMLNDKIHFNLEELDSDKFKKIDSNISAGGSNKPINTIVWYFNLLKVKNKFNPDAIRLPIVLDSPANAELDRDSKHTLLKYIFEESDKDSQLIVSTIGFSTSDFKEEHFDNVIELSNSKYELLNTEDYELYKELCKDLVLINE

SEQ ID NO: 91496 - protein, 360 aa, Enterococcus faecalis EnGen0286; identical to SEQ ID NO: 91492

SEQ ID NO: 91497 - protein, 564 aa, Enterococcus faecalis EnGen0286; identical to SEQ ID NO: 91493

SEQ ID NO: 91498 - protein, 360 aa, Enterococcus faecalis EnGen0413; identical to SEQ ID NO: 91492

SEQ ID NO: 91499 - protein, 564 aa, Enterococcus faecalis EnGen0413
MNTLTFNKLYIFSTFENKAKYIEFSNGKNIITTEDDVIGNKKGKSTILKNLYYTMGADCYFEDKWDVQKKISVLEFSVNKTSYIIFRQDKLFKIFDLKKNLLFKTLKRKELSTFLEKIFKFTVKLPNRHTDKLEIAPPAYFYLLNYTDQDKMNGSSFDSFRNLGEYSNFKLNTLYSHFGILDDRYYEVMKLVEQLSEQIKALDDECQLFYKMLEKIENELVDKVSFPTNFDVLQQEVDSTKNQYEKIVHSLQLTKNRLINQRNDNYEVKQELANLRKIIRKNDKDKKTINSHTCPKCHSIITDNLELKINTLNNEEDFLFLANELEKESLKVEANIYKEEKKYQQLLDTLKKYEDKLALSSKEISNVLKHKGLMEVRDKLIMDIGNSQVNLKQAQESLKEQRKILKEYLELKKQINEIYYELMLNDKIHFNLEELDSDKFKKIDSNISAGGSNKPINTIVWYFNLLKVKNKFNPDAIRLPIVLDSPANAELDRDSKHTLLKYIFEESDKDSQLIVSTIGFSTSDFKEEHFDNVIELSNSKYELLNTEDYELYKELCKDLVLINE

SEQ ID NO: 91500 - protein, 360 aa, Enterococcus faecalis; identical to SEQ ID NO: 91492

SEQ ID NO: 91501 - protein, 564 aa, Enterococcus faecalis; identical to SEQ ID NO: 91493

SEQ ID NO: 91502 - protein, 328 aa, Bacillus cereus m1550
MQISFAMWKIFELYQNEDFTVAMDCIDDVVIFKTSNEKPNIVTYQLKTKDSTAGNFELKSLINKDVFLKMYDHIEKIDADIKEIYLITNNPLKYKQKMVNAERILFENLDADIKKLIEENMSKSPIFAEKGLSPKFIYSLLDMSFHNHREISQQKLNSLLMKQKIDISITAADALFNTLQDILTTKQNYEFSLQDEFNTVLNKKSYSKTEFASLLDNSKKINEDVLTFEDICADYKGKRLGLKEESLYRRAMASVKEKCNKSPNILQNINRDISLYAKEQIDTNEELTRSGLVILLQNAFDDKINVELSKEEKEILYMQNIELTLREG

SEQ ID NO: 91503 - protein, 551 aa, Bacillus cereus m1550
MIEKKAKSVDFEDGINIVTSKGNQLGKSTIMKSIYYTLGAEVFFADRLNVKSKIHMLETEVNDKKYTFIRHGDVVVIKDVKEIFKTSNASELSSKLHEIFGFSVFLEDKQKKYVIAPPVFRYIPYYIDQDHGWTSELKSFDKLGQFDKKSRDLLFYYHLNILDEDYGVKLKEKKELDVAMNDLKTRKKEVLGLLAYIRENITAFNLEMDITALQIQKREILSKYKKYAYDLNNIRRTIIEYQEEIFKIDNVIDNLTSTLKQNDKVREHIKHQFDVECPYCNNHFEIQAKDILRINYNIVDLEASKLEMLDIKEKLLGKMKKVKKEYEDYQATLKTIEEEKVDSDNTLEDILKFKGLQETQNQLNTELVKNAGDIEEKSEDLKEIRKDLKKWQDEIDKANSSYKDILNLNLIRFNTNEHALPEKYNIGKNLKASGSGQVRVNLARVYSFIKLLEEYNPEGLKYPLVIDSPKGGEQSTTNSELILRLLTEKAQISNQIILATIDFESFYNGDTKKFNIITLENEPYHLLSTKDYENNQVIIDDFVSLYFEANQ

SEQ ID NO: 91504 - protein, 373 aa, Bacillus cereus H3081.97
MKTIISTELREQAGSNSYNRFEYQVHWIVYHMIQEYKKNSEFYIFCEFHDDMTKTSLLEKPNCAEFFQIKTTERFKQWSLKNLFKTYKKQGGGIKNSFLGFLFYNFLKFSEECTKCHFVSNIGMDETVRVWQSVIEDRKELKTEEPSLYNEIKGLLREEYKDLEIEEFNNVFEIFIQNTFLYHGELPLENYEKVVAGSFFVMLENDKIYTSNSNKILKDLIEEVRKKSKKKIQTPISYNALKKEKGISSEIFSKIKDYITDIEDDEQKYYELEETLEEQRIGNFRIKLLIRLLKIHKRKTLDFSNTLYINSAEEILEIIDETLLNYYESIDDFEYLKTTVLNKVIQKCECIISNKVGIDKVLVEALFYERLVT

SEQ ID NO: 91505 - protein, 511 aa, Bacillus cereus H3081.97
MEKEWKKIIDIYLLFFQVDLENYCIVREGDFYKIFKITGDNDGYEQIIATDSFHTYSDKLMEMLEVSMDCITNDGKLISVTPPLLFRFQYIDQDRGWEKIGESFSNMKYVKDWKGNTNKYVSGFQGEDFYKIKREKEIFRQVIDEYNHKLAHFEEFIGNLRLSMDGIENADCPNDEQNVNNKEAVKDLFNQLDFIEKECIQLEEMLSKLKNQRYEKVLELSFIKASVSELEADHQFAMQEDDTLKCPFCGVVHDNNIENRIEIVKDIQSGNALVKIIRKDIEELDLKISNLIKQKNEYKLRYKFIKRKLEKEKDSISVINIYKNEGKLELVNTSLRKQEEVKKIIDKGVVQKEKLEEKLAVLNSNERRNNIYKELKGYCREVFDLLNLPHSAIKFNDFVQRLEKTGSEHSRIVYAYHISLYLYNLNRCKSPFNLLVMDTPNQQGQDAKNLKNIDSVLELLMSEEGQVIIGTERETGYESVANTVTKLSEEKKCLNTEKYQKHIDIVNALSF

SEQ ID NO: 91506 - protein, 355 aa, Bacillus cereus VD014
MDISSYPSLETYEARENTGSRSSNRLAMQISFAMWKIFELYQNEDFTVAMDCIDDVVIFKTSNENPTIVTYQLKTKDATTGNFELRKLIGDNVFLKMYDHIEKIDADVEEIYLITNNPLKFRKKTVNAERILFEKLDEDIKELIEENMSQSKVFADKGLSSKFIYSLVDMSFHNHREISQYKLNSLLMKEKIDISITAADALFNALQDILTTKQNYEFSLQDEFNTVLKKKSYSKTEFTSLLDNSKKINAYVLSFEDIRTNYKSKPLKLKEESLYRRAMASVKEKCNKSPNILQNINEDIFQYAKEQIDINDEITRIELVILLQSVFDDKINVELSKEEKEILYMQNIELALREG

SEQ ID NO: 91507 - protein, 564 aa, Bacillus cereus VD014
MNKIIIRKLFIFDVIEKKAKSVDFEDGINIVTSKGNQLGKSTIMKSIYYTLGAEVFFADRLNVKSKIHMLETDVNDKKYTFIRHGDVVVIKDGKGIFKTSNASELSSKLHDIFGFSVFLEDKQKKYVIAPPVFRYIPYYIDQDHGWTSELKSFDKLGQFDKKSRDLLFYYHLNILDEDYGVKLKEKKELDASMTDLKTRKKEILGLLAYIRENITAFNLEMDITALQIQKREILNKYKKYSYDLNNIRRKILEYQEEIFKIDNVIDNLNSTLKQNDKVREHIKHQFDVECPYCNNHFEIQAKDILRINYNIVDLEASKLEMLDIKEKLLGKMKKVQKEYEDYQATLKAIEEEKVDSENTLEDILKFKGLQETQNQLNTELVKNTGDIEEKSEDLKEIRRDLKKWQDEIDKVNSRYKDILNLNLIRFNTNEHALPEKYNIGKNLKASGSGQVRVNLARVYSFIKLLEEYNPTGLKYPLVIDSPKGGEQSTTNSELILRLLTEKAQISNQIILATIDFESFYNGDTKKFNIISLENEPYHLLSAEDYQNNQVIIDDFVSLYFEANQ

SEQ ID NO: 91508 - protein, 373 aa, Bacillus cereus; identical to SEQ ID NO: 91504

SEQ ID NO: 91509 - protein, 511 aa, Bacillus cereus; identical to SEQ ID NO: 91505

SEQ ID NO: 91510 - protein, 373 aa, Bacillus cereus
MVQSIIQSELREQAGSNSFNRFDYQAHWTLYHMIEEYKKNIPFYVFCEFHDDMTKTELSEHPSCAEFFQVKTTESFKEWTLKRLFRTYKKPNGDFKHSFLGFLFYNFLKFKDECTKCHFVSNIDMDEDVRKWQAVIEDKKLLKKKEPKLYNEIKAFLKIEYPSLKEPEFTSVFDTFIQNTFLYYGGLPLENYEKSVAGAFFIMLDNEDILTSTGNRIFKDILEDVRKKSKKKIKTPISYKSLKEEKGISSESFSRIKDQVATFSKSEQVYQDIKINFESHLGKMKMKMLIRLLEKHKRKVLDSSNVLYLESSEDILEAIDDILLDHYDKLDDLDFVTKNILNEVLEKSNTLIDDGIGINKVLVEALFYERIVS

SEQ ID NO: 91511 - protein, 568 aa, Bacillus cereus
MNRLTLKKLIVISESEKRSREIEFKEGLNIIIGKNKTGKSSLIKSIFFTFGCEVKFEDEWKKLIDKYLLYFQYGNRYFCILRINKSYKIFETNQEFTSYQLIIETDSFHDYSKELMKLLGISMDCLTKSGSPITITPPLLFRFQYIDQDKGWEKIGQSFTNMQYIKDWDSNTNKYVVGFLNEEFYKTKRDRDIIKTDIVNYDIKINHFEEFIKNLSASINKSNTEDTFDKDDNNRYSNNKELNQSLVNKMDSIEKEILELVEKLSKIKNKRYEKTLELNFIKENVKELEADHTFAIHEDPNLKCPFCGSVHENSLENRIEIVKDIQTGSELVALFRSEIKELDSKIHKLSTRKKQLTLNYKSLKKNVEQVKENVSIIKSYQDQGKIEMIDSSIKQKEEIISARDTKNSQKLILDDQLNQLKSPQRRNLISQALKSYCMTVYDILNIPSSFIKLRDFVQTLQKTGSDNPRMIYAYHISLYLYNLNREHSPFNFLVIDTPNQQGQDEENLKSIDSALSLLTSKNGQVIIGTERETGHEENASKVTYLIEERRCLTSINYKEHINLLHSLL

SEQ ID NO: 91512 - protein, 355 aa, Bacillus cereus
MDISSYPSLETYEARENTGSRSSNRLAMQISFAMWKIFELYQNEDFTVAMDCIDDVVIFKTSNENPTIVTYQLKTKDATTGNFELKKLIGDNVFLKMYDHIEKIDEDVEEIYLITNNPLKFRKKTVNAERILFEKLDEDIKELIEENMSQSKVFVDKGLSSKFIYSLVDMSFHNHREISQYKLNSLLMKEKIDISITAADALFNALQDILTTKQNYEFSLQDEFNTVLKKKSYSKTEFTSLLDNSKKINAYVLSFEDIRTNYKSKPLKLKEESLYRRAMASVKEKCNKSPNILQNINKDIFQYAKEQIDINDEITRIELVILLQSVFDDKINVELSKEEKEILYMQNIELALREG

SEQ ID NO: 91513 - protein, 564 aa, Bacillus cereus
MNKIIIRKLFIFDVIEKKAKSVDFEDGINIVTSKGNQLGKSTIMKSIYYTLGAEVFFADRLNIKSKIHMLETEVNDKKYTFIRHGDVVVIKDVKGIFKTSNASELSSKLHDIFGFSVFLEDKQKKYVIAPPVFRYIPYYIDQDHGWTSELKSFDKLGQFDKKSRDLLFYYHLNILDEDYGVKLKEKKELDASITDLKTRKKEILGLLAYIRENITAFNLEMDITALQIQKREILNKYKKYAYDLNNIRRKILEYQEEIFKIDNVIDNLNSTLKQNDKVREHIKHQFDVECPYCNNHFEIQAKDILRINYNIIDLEASKLEMLDIKEKLLGKMKQVQKEYEDYQATLKAIEEEKVDSENTLEDILKFKGLQETQNQLNTDLVKNAGDIEELSDDLKEIRQDLKKWQDEIEKANSSYKDILNLNLIRFNTNEHALPEKYNIGKNLKASGSGQVRVNLARVYSFIKLLEEYNPKGLKYPLVIDSPKGGEQSTTNSELILKLLTEKAQISNQIILATIDFESFYNGDTKKFNIITLENEPYHLLSAEDYQNNQVIIDDFVSLYFEANQ

SEQ ID NO: 91514 - protein, 373 aa, Bacillus cereus; identical to SEQ ID NO: 91504

SEQ ID NO: 91515 - protein, 563 aa, Bacillus cereus
MILKKLIVISKKEHKSREINLDKGLNIIIGKNKTGKSSLVKSIFHTLGCNVKMEKEWKKIIDIYLLFFQVDLENYCIVREGDFYKIFKITGDNDGYEQIIATDSFHTYSDKLMEMLEVSMDCITNDGKLISVTPPLLFRFQYIDQDRGWEKIGESFSNMKYVKDWKGNTNKYVSGFQGEDFYKIKREKEIFRQVIDEYNHKLAHFEEFIGNLRLSMDGIENADCPNDEQNVNNKEAVKDLFNQLDFIEKECIQLEEMLSKLKNQRYEKVLELSFIKASVSELEADHQFAMQEDDTLKCPFCGVVHDNNIENRIEIVKDIQSGNALVKIIRKDIEELDLKISNLIKQKNEYKLRYKFIKRKLEKEKDSISVINIYKNEGKLELVNTSLRKQEEVKKIIDKGVVQKEKLEEKLAVLNSNERRNNIYKELKGYCREVFDLLNLPHSAIKFNDFVQRLEKTGSEHSRIVYAYHISLYLYNLNRCKSPFNLLVMDTPNQQGQDAKNLKNIDSVLELLMSEEGQVIIGTERETGYESVANTVTKLSEEKKCLNTEKYQKHIDIVNALSF

SEQ ID NO: 91516 - protein, 370 aa, Bacillus mycoides Rock1-4
MGALNKIFSTKPPENSGSRSANRFSFQKNWALIKILELHKDKLDYSIVLDYHDDVLVLDSESNPEKIDFYQIKTKSTGKSNWTIAALSKFSEGKDKQILNSMLGKLYKNKLNFPKETKSLNFVSNKAYTIKLNDNKNAKDSAAILIPFSTICTTEREKVEKELKKEMNITECGDIFDCTFLHITPLSLTESKEHAIGKSSQILREMGYFKVDPDLFYKFLYGEIELRNDCEMEFHSLEDFIKHKSLAKSAVQSIINHLNPKDDLNDKWNRINEELRATNHFKLYDLKQLESKWKEWELRILTNDLTLISTIKNAINELIKINLHKCSSVYDLLIKVYEEYMLLDKEYPEDLFNKYEIQALILMQYTIIEL

SEQ ID NO: 91517 - protein, 483 aa, Bacillus mycoides Rock1-4
MVKEKNRYSLFNHQKNLIGSWDKVTEELAPEMAKLLGYKLTLPNRRSKEVIPPPAYFFLPFYIDQDKSWNQEWSSFENLSQFANWKDIVIQYHAGVLTDKYFEVSNQIMMDQAQKDINTKNYDSLQYALRRFENELKVSQTFNIESDDFKEEINSLIKELEQLQLVEDEWKAQLTDLYNDRLILKQRKKSIEQILNGSQVDYSKIYNKCKTCGSQHQDSFTARLKAAETEAKCHQLLNEIAIKLKRLDENIKEVNQIFTQKGKEKENLNNILISKRGALTIKEIISLEGSYQFKTKIQEDLYRELEKVNELEIKLANLRKQKKQIKSDTRKTEITTEYINCMTYFLEKLNVKNISLKSYNSLKSKIKEQGSHQPRALLAYYLSILKLIEKHSTSTLCPIVIDSPNQQDQSEENLNKMLNAIMNERPKNSQLILAVVERPNTEIQGSHIMINFNQEHRLLEEKEYNTVLKEVENILTDSSLSKL

SEQ ID NO: 91518 - protein, 369 aa, Bacillus thuringiensis serovar andalousiensis BGSC 4AW1
MEVGETLNVREAIVSNRPRENSGSKSANRFDYQKNWALCKLFEIHLSKDDYLIVFDYHEDIILTDSETNPQKITFYQIKTKETSHWNITDLVRPKKTKDSSKAFSKIGSLYKNKLLFKEVADSLHFVSNTYYNVELEDETPANNIKELCISRLTESQKKTIIAKLKKELELENLQIEKDLLYLDISPLSLKENAEHAKGHLVQFLEKIDPNLRYNGNIIYSVLFDEINRRNNYEWDVEDFEEIKKYKGIGKSEFSNMVDKIVTSSQSSDLWNELKTDIDELKLNLKMKKQLRKQFFKYETERMNHSNTHLQNTRSAIIKLISKHEENCESLKELMAAVLTEFNTSYKLNDGIFSEEYIMAIILMEFWLS

SEQ ID NO: 91519 - protein, 551 aa, Bacillus thuringiensis serovar andalousiensis BGSC 4AW1
MKEKRSKEITFHEKVTIINGINDTGKSALIKSIFYTFGANTKLQAKWKKANIVSCVTFKFQNNDYKMLRYKDQFGLFDNEDKLIQSFYSVTDELAPYFANLFNFKIELKDSNNRMLQVPPAFCLLPFYIDQDNGWQKTWSSFEQLGQLKYGWKKNIIDFHTGARPSEYYSLKKEKDELLSYKQQHSEEQKELDRLYLRTVKKFGTTDVSVDIDEFEKEIEILLNQLNNKQTDLEYAKENLVGLYNDRYMIEDQINLTNSVMDELNKDYTFATKNILEDKVTCPTCGEIYSNSFNERFSIANDESRCFELIADLKKDLQKINKKIDIQKKELNNIKEDFKEIHTLLQTKKKQVALNDVIQNEGKRMLLSSLATDIAHVRSIILDLEEQIKTKDDELKNIDNKEKRKIIKTEYLDYMNEFLLELDVKTLSTEDFKNLDTTIKESGSDVPRALLAYFFSILKLIVARSTSTLFPIIIDSPLQQEPDDENKVRILEFIKKNTPQDAQLILSTVDSANVNFEGSTILLNKKLHVLDDQDYEKHWKQLKLLLEQLSN

SEQ ID NO: 91520 - protein, 335 aa, Peptoclostridium difficile 002-P50-2011
MNLPKDLSGSIAKNRFRLELLWGISKIIDEHKANNEYTIIFDFKCDIELHKEDELDFYQIKTKKSGNYNSNNLCKKGKNKNNSILGKLYALYSPNYNIKLAIVCNKQLKINNKEIDFPEQCFGDLDQDVLDDVRKKLCTELNLDTVCLDNVFYIFDNMDLLNPEDSIRGKLVKSFVDIKGEEPQNPNALYRLVVDSVKEKASYEFDSGTYEDVVKNKGITRSEFDKMLNAHKKESKNGINETQEYINNLSFAKRRRYNTALGNILETQQSESLRLIKIKIYNYIVEHENSLDDIESYLKEISKLFDDDFDVEFTDDMKSVQYIMIYYMYASGGIL

SEQ ID NO: 91521 - protein, 560 aa, Peptoclostridium difficile 002-P50-2011
MNVIFDKIYIFDVVKKKAYSTEFKKGVNIITSSDIDGTDRGKSVLLRSLYHALGADSHFDSKWGEKDKVYILFFKVDDKDFSIYRSQKLFKIFNAKGDLIFTTIHRSELADFFGNLFNFSICLPQKNTNQLVIAPPAYSFLLNFLDQDEYIGTKFNSFKNLAQFSNFKLNVIYSHLGIYNKEYFELVKHKEELELEIKSKKEEIEDLIKMKDRTILILDGFSCPETSSALENELNIETQKYSSLINEMNLVRNKLVDLRNQLVEQNITLSQISKFEIKEEKEIKTILKSKVCPECHSVLDSTLELRSKRYNHIDNALSLKDAIKTENAHIEDEILKNEGIYSNLTLVLEEHNKKICKNKKEIKDYIKFRGLNKLIDEINNDLTINSRVIDSTKEALKPLKKEFKSVKDKIKSVDENYYYLIDKLKIRFNLNELEADSYEQLSKNFCASGSNKPLSTVIWYLTLNDLKQKFNPEGTTFPMVFDSPNNAETDQEKKQALVEYIMESSDQFSQLIVSAIGFSEKDYSIDSNINIKVLENEKYSLLNSEMYVQNYELLQCMNDA

SEQ ID NO: 91522 - protein, 354 aa, Peptoclostridium difficile 002-P50-2011
MSKIEYYMNLPYDLSGSMSKNRFRNELLWGLKKMYELYKTNEDFVVVFDYRCDIEVHLENKFEFYQVKTQNNSGTYTINKLTDKKKGSKSVVGNLYSLKYDINMNEIDDVYVAIVSNAPLNDGKKTYNNSHEVKIKTIDSSAIEKIKLSIKNDLNIDEDINLENLFFIRIGLDLIEPQKTLIGETAIFFEDVFGRECSKVKSLYNVLYEEIYSKSAYELDINTYENIVSKKGINRDRMDIILKSYANNTDKSVELAKYSINEWYKNNFSRRLSLIKSLTTIVSKLSESSILKDIENCILSYIYNNIDKLQVSDKELIEIISEIVEEKRPIEVSKTDIEALILLTLKKYEEGVYE

SEQ ID NO: 91523 - protein, 557 aa, Peptoclostridium difficile 002-P50-2011
MNSLFVNSLYIFEYESKMAKKIDFKHGINILTSDEKSGNDVGKSVLLKSIYHTLGADSIFDHMWNKITKTYILNVTIKNKTYYVYRRDNLFKIYNTNFKKIFMTNNRDELSNYLSDLYSFKVMLPKRENEELELAPPVYSYLLNYIDQDHLDGSKFSSFNSLTQFPNYKENVIYTHFGLFDEEYYKAIKELEILKSEEKNKKKEREVTLNMLNKIKSYLGNLDAPESIEVLNIELNKTKEEYSNIVINLQKIKNNLMKIRNEKVDLELNIKEIELTRRNEMKKLKVKNVCPSCSHEIEDIDSKFIINNQIEDLIILKDELESEIIKCNRVIEKKEEEYQSLLDKLHEYESNMKINDDSISNVLKHKAYIDTKDDIVLDLEIIDKKIKEIQQTIEPYDKKIKEYNSLKKKANAKYEELMKKAKKDFGLEEIDENKIKNIKNNFIARGSNRAITTIMWYLTLLAVKYEFNENAIKFPLILDSPNNVESDEIKEESLFKYIFKNTKTDTQLILSSLGFNEMQFSEFKFDNIIKLENSKYNLLNKEDYYNNIDILNKIFEN

SEQ ID NO: 91524 - protein, 335 aa, Peptoclostridium difficile 050-P50-2011; identical to SEQ ID NO: 91520

SEQ ID NO: 91525 - protein, 560 aa, Peptoclostridium difficile 050-P50-2011; identical to SEQ ID NO: 91521

SEQ ID NO: 91526 - protein, 354 aa, Peptoclostridium difficile 050-P50-2011; identical to SEQ ID NO: 91522

SEQ ID NO: 91527 - protein, 557 aa, Peptoclostridium difficile 050-P50-2011; identical to SEQ ID NO: 91523

SEQ ID NO: 91528 - protein, 354 aa, Peptoclostridium difficile CD3
MSKIEYYMNLPYDLSGSMSKNRFRNELLWGLKKMYELYKTNEDFVVVFDYRCDIEVNLENKFEFYQVKTQNNSGTYTINKLTDKKKGSKSVVGNLYSLKYDINMNEIDDVYVAIVSNAPLNDGKKTYNNSHEVKIKTIDSSAIEKIKLSIKNDLNIDEDINLENLFFIRIGLDLIEPQKTLIGETAIFFEDVFGRECSKVKSLYNVLYEEIYSKSAYELDINTYENIVSKKGINRDRMDIILKSYANNTDKSVELAKYSINEWCRNNFSRRLSLIKSLTTIVSKLSESSILKDIENCILSYIYNNIDKLQVSDKELIEIISEIVEEKRPIEVSKTDIEALILLTLKKYEEGVYE

SEQ ID NO: 91529 - protein, 557 aa, Peptoclostridium difficile CD3; identical to SEQ ID NO: 91523

SEQ ID NO: 91530 - protein, 354 aa, Peptoclostridium difficile CD8
MSKIEYYMNLPYDLSGSMSKNRFRNELLWGLKKMYELYKTNEDFVVVFDYRCDIEVHLENKFEFYQVKTQNNSGTYTINKLTDKKKGSKSVVGNLYSLKYDINMNEIDDVYVAIVSNAPLNDGKKTYNNSHEVKIKTIDSSAIEKIKLSIKNDLNIDEDINLENLFFIRIGLDLIEPQKTLIGETAIFFEDVFGRECSKVKSLYNVLYEEIYSKSAYELDINTYENIVSKKGINRDRMDIILKSYANNTDKSVELAKYSINEWCKNNFSRRLSLIKSLTTIVSKLSESSILKDIENCILSYIYNNIDKLQVSDKELIEIISEIVEEKRPIEVSKTDIEALILLTLKKYEEGVYE

SEQ ID NO: 91531 - protein, 557 aa, Peptoclostridium difficile CD8; identical to SEQ ID NO: 91523

SEQ ID NO: 91532 - protein, 354 aa, Peptoclostridium difficile CD9; identical to SEQ ID NO: 91530

SEQ ID NO: 91533 - protein, 557 aa, Peptoclostridium difficile CD9; identical to SEQ ID NO: 91523

SEQ ID NO: 91534 - protein, 342 aa, Peptoclostridium difficile CD42
MSKEKYYMNLPKDLSGSIAKNRFRLELLWGISKIIDEHKANNEYTIIFDFKCDIELHKEDELDFYQIKTKKSGNYNSNNLCKKGKNKNNSILGKLYALYSPNYNIKLAIVCNKQLKINNKEIDFPEQCFGDLDQDVLDDVRKKLCTELNLDTVCLDNVFYIFDNMDLLNPEDSIRGKLVKSFVDIKGEEPQNPNALYRLVVDSVKEKASYEFDSGTYEDVVKNKGITRSEFDKMLNAHKKESKNGINETQEYINNLSFAKRRRYNTALGNILETQQSESLRLIKIKIYNYIVEHENSLDDIESYLKEISKLFDDDFDVEFTDDMKSVQYIMIYYMYASGGIL

SEQ ID NO: 91535 - protein, 560 aa, Peptoclostridium difficile CD42; identical to SEQ ID NO: 91521

SEQ ID NO: 91536 - protein, 342 aa, Peptoclostridium difficile CD132; identical to SEQ ID NO: 91534

SEQ ID NO: 91537 - protein, 560 aa, Peptoclostridium difficile CD132; identical to SEQ ID NO: 91521

SEQ ID NO: 91538 - protein, 342 aa, Peptoclostridium difficile CD159; identical to SEQ ID NO: 91534

SEQ ID NO: 91539 - protein, 560 aa, Peptoclostridium difficile CD159; identical to SEQ ID NO: 91521

SEQ ID NO: 91540 - protein, 263 aa, Peptoclostridium difficile CD165
MCKKGKNKNNSILGKLYALYSPNYNIKLAIVCNKQLKINNKEIDFPEQCFGDLDQDVLDDVRKKLCTELNLDTVCLDNVFYIFDNMDLLNPEDSIRGKLVKSFVDIKGEEPQNPNALYRLVVDSVKEKASYEFDSGTYEDVVKNKGITRSEFDKMLNAHKKESKNGINETQEYINNLSFAKRRRYNTALGNILETQQSESLRLIKIKIYNYIVEHENSLDDIESYLKEISKLFDDDFDVEFTDDMKSVQYIMIYYMYASGGIL

SEQ ID NO: 91541 - protein, 560 aa, Peptoclostridium difficile CD165; identical to SEQ ID NO: 91521

SEQ ID NO: 91542 - protein, 337 aa, Peptoclostridium difficile CD175
MSKNRFRNELLWGLKKMYELYKTNEDFVVVFDYRCDIEVHLENKFEFYQVKTQNNSGTYTINKLTDKKKGSKSVVGNLYSLKYDINMNEIDDVYVAIVSNAPLNDGKKTYNNSHEVKIKTIDSSAIEKIKLSIKNDLNIDEDINLENLFFIRIGLDLIEPQKTLIGETAIFFEDVFGRECSKVKSLYNVLYEEIYSKSAYELDINTYENIVSKKGINRDRMDIILKSYANNTDKSVELAKYSINEWYKNNFSRRLSLIKSLTTIVSKLSESSILKDIENCILSYIYNNIDKLQVSDKELIEIISEIVEEKRPIEVSKTDIEALILLTLKKYEEGVYE

SEQ ID NO: 91543 - protein, 557 aa, Peptoclostridium difficile CD175; identical to SEQ ID NO: 91523

SEQ ID NO: 91544 - protein, 342 aa, Peptoclostridium difficile CD175; identical to SEQ ID NO: 91534

SEQ ID NO: 91545 - protein, 560 aa, Peptoclostridium difficile CD175; identical to SEQ ID NO: 91521

SEQ ID NO: 91546 - protein, 342 aa, Peptoclostridium difficile CD175; identical to SEQ ID NO: 91534

SEQ ID NO: 91547 - protein, 560 aa, Peptoclostridium difficile CD175; identical to SEQ ID NO: 91521

SEQ ID NO: 91548 - protein, 342 aa, Peptoclostridium difficile DA00261; identical to SEQ ID NO: 91534

SEQ ID NO: 91549 - protein, 560 aa, Peptoclostridium difficile DA00261; identical to SEQ ID NO: 91521

SEQ ID NO: 91550 - protein, 342 aa, Peptoclostridium difficile DA00275; identical to SEQ ID NO: 91534

SEQ ID NO: 91551 - protein, 560 aa, Peptoclostridium difficile DA00275; identical to SEQ ID NO: 91521

SEQ ID NO: 91552 - protein, 342 aa, Peptoclostridium difficile DA00044; identical to SEQ ID NO: 91534

SEQ ID NO: 91553 - protein, 560 aa, Peptoclostridium difficile DA00044; identical to SEQ ID NO: 91521

SEQ ID NO: 91554 - protein, 342 aa, Peptoclostridium difficile DA00065; identical to SEQ ID NO: 91534

SEQ ID NO: 91555 - protein, 560 aa, Peptoclostridium difficile DA00065; identical to SEQ ID NO: 91521

SEQ ID NO: 91556 - protein, 337 aa, Peptoclostridium difficile DA00065; identical to SEQ ID NO: 91542

SEQ ID NO: 91557 - protein, 562 aa, Peptoclostridium difficile DA00065
MRRVFMNSLFVNSLYIFEYESKMAKKIDFKHGINILTSDEKSGNDVGKSVLLKSIYHTLGADSIFDHMWNKITKTYILNVTIKNKTYYVYRRDNLFKIYNTNFKKIFMTNNRDELSNYLSDLYSFKVMLPKRENEELELAPPVYSYLLNYIDQDHLDGSKFSSFNSLTQFPNYKENVIYTHFGLFDEEYYKAIKELEILKSEEKNKKKEREVTLNMLNKIKSYLGNLDAPESIEVLNIELNKTKEEYSNIVINLQKIKNNLMKIRNEKVDLELNIKEIELTRRNEMKKLKVKNVCPSCSHEIEDIDSKFIINNQIEDLIILKDELESEIIKCNRVIEKKEEEYQSLLDKLHEYESNMKINDDSISNVLKHKAYIDTKDDIVLDLEIIDKKIKEIQQTIEPYDKKIKEYNSLKKKANAKYEELMKKAKKDFGLEEIDENKIKNIKNNFIARGSNRAITTIMWYLTLLAVKYEFNENAIKFPLILDSPNNVESDEIKEESLFKYIFKNTKTDTQLILSSLGFNEMQFSEFKFDNIIKLENSKYNLLNKEDYYNNIDILNKIFEN

SEQ ID NO: 91558 - protein, 354 aa, Peptoclostridium difficile DA00126; identical to SEQ ID NO: 91528

SEQ ID NO: 91559 - protein, 557 aa, Peptoclostridium difficile DA00126; identical to SEQ ID NO: 91523

SEQ ID NO: 91560 - protein, 354 aa, Peptoclostridium difficile DA00142; identical to SEQ ID NO: 91528

SEQ ID NO: 91561 - protein, 557 aa, Peptoclostridium difficile DA00142; identical to SEQ ID NO: 91523

SEQ ID NO: 91562 - protein, 342 aa, Peptoclostridium difficile DA00154; identical to SEQ ID NO: 91534

SEQ ID NO: 91563 - protein, 560 aa, Peptoclostridium difficile DA00154; identical to SEQ ID NO: 91521

SEQ ID NO: 91564 - protein, 342 aa, Peptoclostridium difficile DA00160; identical to SEQ ID NO: 91534

SEQ ID NO: 91565 - protein, 560 aa, Peptoclostridium difficile DA00160; identical to SEQ ID NO: 91521

SEQ ID NO: 91566 - protein, 337 aa, Peptoclostridium difficile DA00165
MSKNRFRNELLWGLKKMYELYKTNEDFVVVFDYRCDIEVNLENKFEFYQVKTQNNSGTYTINKLTDKKKGSKSVVGNLYSLKYDINMNEIDDVYVAIVSNAPLNDGKKTYNNSHEVKIKTIDSSAIEKIKLSIKNDLNIDEDINLENLFFIRIGLDLIEPQKTLIGETAIFFEDVFGRECSKVKSLYNVLYEEIYSKSAYELDINTYENIVSKKGINRDRMDIILKSYANNTDKSVELAKYSINEWCRNNFSRRLSLIKSLTTIVSKLSESSILKDIENCILSYIYNNIDKLQVSDKELIEIISEIVEEKRPIEVSKTDIEALILLTLKKYEEGVYE

SEQ ID NO: 91567 - protein, 557 aa, Peptoclostridium difficile DA00165; identical to SEQ ID NO: 91523

SEQ ID NO: 91568 - protein, 342 aa, Peptoclostridium difficile DA00183; identical to SEQ ID NO: 91534

SEQ ID NO: 91569 - protein, 560 aa, Peptoclostridium difficile DA00183; identical to SEQ ID NO: 91521

SEQ ID NO: 91570 - protein, 354 aa, Peptoclostridium difficile DA00191; identical to SEQ ID NO: 91528

SEQ ID NO: 91571 - protein, 557 aa, Peptoclostridium difficile DA00191; identical to SEQ ID NO: 91523

SEQ ID NO: 91572 - protein, 342 aa, Peptoclostridium difficile DA00193; identical to SEQ ID NO: 91534

SEQ ID NO: 91573 - protein, 560 aa, Peptoclostridium difficile DA00193; identical to SEQ ID NO: 91521

SEQ ID NO: 91574 - protein, 337 aa, Peptoclostridium difficile DA00195; identical to SEQ ID NO: 91566

SEQ ID NO: 91575 - protein, 540 aa, Peptoclostridium difficile DA00195
MAKKIDFKHGINILTSDEKSGNDVGKSVLLKSIYHTLGADSIFDHMWNKITKTYILNVTIKNKTYYVYRRDNLFKIYNTNFKKIFMTNNRDELSNYLSDLYSFKVMLPKRENEELELAPPVYSYLLNYIDQDHLDGSKFSSFNSLTQFPNYKENVIYTHFGLFDEEYYKAIKELEILKSEEKNKKKEREVTLNMLNKIKSYLGNLDAPESIEVLNIELNKTKEEYSNIVINLQKIKNNLMKIRNEKVDLELNIKEIELTRRNEMKKLKVKNVCPSCSHEIEDIDSKFIINNQIEDLIILKDELESEIIKCNRVIEKKEEEYQSLLDKLHEYESNMKINDDSISNVLKHKAYIDTKDDIVLDLEIIDKKIKEIQQTIEPYDKKIKEYNSLKKKANAKYEELMKKAKKDFGLEEIDENKIKNIKNNFIARGSNRAITTIMWYLTLLAVKYEFNENAIKFPLILDSPNNVESDEIKEESLFKYIFKNTKTDTQLILSSLGFNEMQFSEFKFDNIIKLENSKYNLLNKEDYYNNIDILNKIFEN

SEQ ID NO: 91576 - protein, 354 aa, Peptoclostridium difficile DA00197; identical to SEQ ID NO: 91528

SEQ ID NO: 91577 - protein, 557 aa, Peptoclostridium difficile DA00197; identical to SEQ ID NO: 91523

SEQ ID NO: 91578 - protein, 342 aa, Peptoclostridium difficile DA00203; identical to SEQ ID NO: 91534

SEQ ID NO: 91579 - protein, 560 aa, Peptoclostridium difficile DA00203; identical to SEQ ID NO: 91521

SEQ ID NO: 91580 - protein, 337 aa, Peptoclostridium difficile DA00211
MSKNRFRNELLWGLKKMYELYKTNEDFVVVFDYRCDIEVHLENKFEFYQVKTQNNSGTYTINKLTDKKKGSKSVVGNLYSLKYDINMNEIDDVYVAIVSNAPLNDGKKTYNNSHEVKIKTIDSSAIEKIKLSIKNDLNIDEDINLENLFFIRIGLDLIEPQKTLIGETAIFFEDVFGRECSKVKSLYNVLYEEIYSKSAYELDINTYENIVSKKGINRDRMDIILKSYANNTDKSVELAKYSINEWCRNNFSRRLSLIKSLTTIVSKLSESSILKDIENCILSYIYNNIDKLQVSDKELIEIISEIVEEKRPIEVSKTDIEALILLTLKKYEEGVYE

SEQ ID NO: 91581 - protein, 540 aa, Peptoclostridium difficile DA00211; identical to SEQ ID NO: 91575

SEQ ID NO: 91582 - protein, 342 aa, Peptoclostridium difficile DA00310; identical to SEQ ID NO: 91534

SEQ ID NO: 91583 - protein, 560 aa, Peptoclostridium difficile DA00310; identical to SEQ ID NO: 91521

SEQ ID NO: 91584 - protein, 342 aa, Peptoclostridium difficile F249; identical to SEQ ID NO: 91534

SEQ ID NO: 91585 - protein, 560 aa, Peptoclostridium difficile F249; identical to SEQ ID NO: 91521

SEQ ID NO: 91586 - protein, 342 aa, Peptoclostridium difficile P2; identical to SEQ ID NO: 91534

SEQ ID NO: 91587 - protein, 560 aa, Peptoclostridium difficile P2; identical to SEQ ID NO: 91521

SEQ ID NO: 91588 - protein, 337 aa, Peptoclostridium difficile P5
MSKNRFRNELLWGLKKMYELYKTNEDFVVVFDYRCDIEVHLENKFEFYQVKTQNNSGTYTINKLTDKKKGSKSVVGNLYSLKYDINMNEIDDVYVAIVSNAPLNDGKKTYNNSHEVKIKTIDSSAIEKIKLSIKNDLNIDEDINLENLFFIRIGLDLIEPQKTLIGETAIFFEDVFGRECSKVKSLYNVLYEEIYSKSAYELDINTYENIVSKKGINRDRMDIILKSYANNTDKSVELAKYSINEWCKNNFSRRLSLIKSLTTIVSKLSESSILKDIENCILSYIYNNIDKLQVSDKELIEIISEIVEEKRPIEVSKTDIEALILLTLKKYEEGVYE

SEQ ID NO: 91589 - protein, 557 aa, Peptoclostridium difficile P5; identical to SEQ ID NO: 91523

SEQ ID NO: 91590 - protein, 354 aa, Peptoclostridium difficile Y384; identical to SEQ ID NO: 91528

SEQ ID NO: 91591 - protein, 557 aa, Peptoclostridium difficile Y384; identical to SEQ ID NO: 91523

SEQ ID NO: 91592 - protein, 337 aa, Peptoclostridium difficile Y215; identical to SEQ ID NO: 91566

SEQ ID NO: 91593 - protein, 540 aa, Peptoclostridium difficile Y215; identical to SEQ ID NO: 91575

SEQ ID NO: 91594 - protein, 342 aa, Peptoclostridium difficile Y231; identical to SEQ ID NO: 91534

SEQ ID NO: 91595 - protein, 560 aa, Peptoclostridium difficile Y231; identical to SEQ ID NO: 91521

SEQ ID NO: 91596 - protein, 342 aa, Peptoclostridium difficile Y358; identical to SEQ ID NO: 91534

SEQ ID NO: 91597 - protein, 560 aa, Peptoclostridium difficile Y358; identical to SEQ ID NO: 91521

SEQ ID NO: 91598 - protein, 337 aa, Peptoclostridium difficile P7; identical to SEQ ID NO: 91588

SEQ ID NO: 91599 - protein, 562 aa, Peptoclostridium difficile P7; identical to SEQ ID NO: 91557

SEQ ID NO: 91600 - protein, 347 aa, Peptoclostridium difficile P13
MNLPYDLSGSMSKNRFRNELLWGLKKMYELYKTNEDFVVVFDYRCDIEVHLENKFEFYQVKTQNNSGTYTINKLTDKKKGSKSVVGNLYSLKYDINMNEIDDVYVAIVSNAPLNDGKKTYNNSHEVKIKTIDSSAIEKIKLSIKNDLNIDEDINLENLFFIRIGLDLIEPQKTLIGETAIFFEDVFGRECSKVKSLYNVLYEEIYSKSAYELDINTYENIVSKKGINRDRMDIILKSYANNTDKSVELAKYSINEWCKNNFSRRLSLIKSLTTIVSKLSESSILKDIENCILSYIYNNIDKLQVSDKELIEIISEIVEEKRPIEVSKTDIEALILLTLKKYEEGVYE

SEQ ID NO: 91601 - protein, 557 aa, Peptoclostridium difficile P13; identical to SEQ ID NO: 91523

SEQ ID NO: 91602 - protein, 342 aa, Peptoclostridium difficile P19; identical to SEQ ID NO: 91534

SEQ ID NO: 91603 - protein, 560 aa, Peptoclostridium difficile P19; identical to SEQ ID NO: 91521

SEQ ID NO: 91604 - protein, 342 aa, Peptoclostridium difficile P20; identical to SEQ ID NO: 91534

SEQ ID NO: 91605 - protein, 560 aa, Peptoclostridium difficile P20; identical to SEQ ID NO: 91521

SEQ ID NO: 91606 - protein, 337 aa, Peptoclostridium difficile P46; identical to SEQ ID NO: 91588

SEQ ID NO: 91607 - protein, 557 aa, Peptoclostridium difficile P46; identical to SEQ ID NO: 91523

SEQ ID NO: 91608 - protein, 354 aa, Peptoclostridium difficile P48; identical to SEQ ID NO: 91530

SEQ ID NO: 91609 - protein, 557 aa, Peptoclostridium difficile P48; identical to SEQ ID NO: 91523

SEQ ID NO: 91610 - protein, 354 aa, Peptoclostridium difficile P70; identical to SEQ ID NO: 91530

SEQ ID NO: 91611 - protein, 557 aa, Peptoclostridium difficile P70; identical to SEQ ID NO: 91523

SEQ ID NO: 91612 - protein, 342 aa, Peptoclostridium difficile P71; identical to SEQ ID NO: 91534

SEQ ID NO: 91613 - protein, 560 aa, Peptoclostridium difficile P71; identical to SEQ ID NO: 91521

SEQ ID NO: 91614 - protein, 347 aa, Peptoclostridium difficile P71
MNLPYDLSGSMSKNRFRNELLWGLKKMYELYKTNEDFVVVFDYRCDIEVHLENKFEFYQVKTQNNSGTYTINKLTDKKKGSKSVVGNLYSLKYDINMNEIDDVYVAIVSNAPLNDGKKTYNNSHEVKIKTIDSSAIEKIKLSIKNDLNIDEDINLENLFFIRIGLDLIEPQKTLIGETAIFFEDVFGRECSKVKSLYNVLYEEIYSKSAYELDINTYENIVSKKGINRDRMDIILKSYANNTDKSVELAKYSINEWYKNNFSRRLSLIKSLTTIVSKLSESSILKDIENCILSYIYNNIDKLQVSDKELIEIISEIVEEKRPIEVSKTDIEALILLTLKKYEEGVYE

SEQ ID NO: 91615 - protein, 557 aa, Peptoclostridium difficile P71; identical to SEQ ID NO: 91523

SEQ ID NO: 91616 - protein, 354 aa, Peptoclostridium difficile P73; identical to SEQ ID NO: 91530

SEQ ID NO: 91617 - protein, 557 aa, Peptoclostridium difficile P73; identical to SEQ ID NO: 91523

SEQ ID NO: 91618 - protein, 342 aa, Peptoclostridium difficile P74; identical to SEQ ID NO: 91534

SEQ ID NO: 91619 - protein, 560 aa, Peptoclostridium difficile P74; identical to SEQ ID NO: 91521

SEQ ID NO: 91620 - protein, 354 aa, Peptoclostridium difficile P74; identical to SEQ ID NO: 91522

SEQ ID NO: 91621 - protein, 557 aa, Peptoclostridium difficile P74; identical to SEQ ID NO: 91523

SEQ ID NO: 91622 - protein, 354 aa, Peptoclostridium difficile P75; identical to SEQ ID NO: 91530

SEQ ID NO: 91623 - protein, 557 aa, Peptoclostridium difficile P75; identical to SEQ ID NO: 91523

SEQ ID NO: 91624 - protein, 354 aa, Peptoclostridium difficile F601; identical to SEQ ID NO: 91528

SEQ ID NO: 91625 - protein, 557 aa, Peptoclostridium difficile F601; identical to SEQ ID NO: 91523

SEQ ID NO: 91626 - protein, 354 aa, Peptoclostridium difficile P37; identical to SEQ ID NO: 91530

SEQ ID NO: 91627 - protein, 557 aa, Peptoclostridium difficile P37; identical to SEQ ID NO: 91523

SEQ ID NO: 91628 - protein, 337 aa, Peptoclostridium difficile P68; identical to SEQ ID NO: 91588

SEQ ID NO: 91629 - protein, 557 aa, Peptoclostridium difficile P68; identical to SEQ ID NO: 91523

SEQ ID NO: 91630 - protein, 354 aa, Peptoclostridium difficile E13; identical to SEQ ID NO: 91522

SEQ ID NO: 91631 - protein, 557 aa, Peptoclostridium difficile E13; identical to SEQ ID NO: 91523

SEQ ID NO: 91632 - protein, 342 aa, Peptoclostridium difficile E13; identical to SEQ ID NO: 91534

SEQ ID NO: 91633 - protein, 560 aa, Peptoclostridium difficile E13; identical to SEQ ID NO: 91521

SEQ ID NO: 91634 - protein, 342 aa, Peptoclostridium difficile E7; identical to SEQ ID NO: 91534

SEQ ID NO: 91635 - protein, 560 aa, Peptoclostridium difficile E7; identical to SEQ ID NO: 91521

SEQ ID NO: 91636 - protein, 368 aa, Clostridium pasteurianum NRRL B-598
MSKAKVYETLPYDLSGSRSKNRFRNELMWGLEKLYEIYRTGEDFCIIFDYVCDIEIHFINRFEFYQIKTSNKGEAYTIGKISNPDKQGNSILGKVYILKNIIDASKLLDATIIAIVVNVPLKTLDDTVHSSVKKLNLNDIKDTKEAKRVADRNNGDIENQSKNKIVENLKLEIKTDTIDLSNAYYINSSLDLINPDNTLLGITLKFIEEITGKEASRASTLYRTLKDVITDKACYELKCETYPEVEKYKGITKTEFEFILDRCISISEDYVKEAKYIIENNYHGFSEKIKLIKGLSFIVTELNGNVILNNLKEKIMNYINDNIDELNDAVRETIDSISQVFNKEFPIEYSSHERIALVILMVAKYKED

SEQ ID NO: 91637 - protein, 559 aa, Clostridium pasteurianum NRRL B-598
MSSLIINKLYIFSPHEKKSKTVDFKAGKNIITSSQKNGSKRGKSTLTKSIYYALGADCFFDDEWNINDKIYIVDFTISNTSYYIFRWDRLFKVYSKDNFKELFKTNLRNELAKYLKTIFKFSVELPNKETENLEVTPPAFNYLLNYIDQDKIDGTNFNSFKNLSQYSDYKENVLYYHFNVYNEEYYNSIKSIEKLSDKKKELQNRVKLNKGMIDKINKNTNNIDYSVDIDNLIIELDDSKAEYRKIIDILNRIKKGLIKLRNEKEDLLVELKDLEIFNKNCEKNVKQLNRHKCPHCNSEIQDTLDEKIKRYNEIDDILYLKYEIEDSILKIERKIELEEKKYKDELVNLNEYESRLKINSKDINDIIKYKGFIEIKNSLYSEIEIDNAEITEIDESIKNLNRIKSSYAVKKSSVNKRYSELMKKDKEYFGLKEINENNFSNIKNVFTAGGSNKPIVTIMWYMNLLKLKAEFNSEAIKFPLILDSPNNVESDDDKKKTLFNYLFKEIQPNTQLIISTLGFKQSDYKEFKFENIVELTNDKYKMLSADEYNKYKEFLNKFI

SEQ ID NO: 91638 - protein, 363 aa, Clostridium sordellii VPI 9048
MDNAEAYMRLPHDLSGARSKGRFDYELLWGLKKMISLFIEDKKFIAVFDQACDVEFHFDGKYEFYQVKTDIKSGAYTIDKLTKKEKKKKNSILGNLCLLKYVDSIENKNTKLYIVSNTPLKDNSNKLYSDCYMISLNSICEDSVDTIKARMKSELDLTEINLKDIYFIREHMNLIDPEAEIRGELTKLFEDKLKCDYRDIGVLYKILKSDILKKGKYELKSSNYESVIKNKGFSYEQLEYIINQYKKTDSGYIGSAKEYINNSYSSTIGERIKYNKAWRSVLSMLVKSKDLQLLEKDIYGYLKSNLVVIGELSDKELIERIREEFYKKKLIEMDDTEFLVFLIIIIKKSEEQIFKELEVSEYE

SEQ ID NO: 91639 - protein, 547 aa, Clostridium sordellii VPI 9048
MSSLFVKNLYIFECTNKLAKKVEFKYGINIITSDSEKGNSVGKSSILRSIYHTLGADGEFNSEWASTSKTYLLEFEIDNNTYYIYRRDSLFKIFDKDFNRLYSTINRSELSWYLSNIFDFKVMLKNREDELEIAPPAYSYLLNYIDQDKMNGADFCSFKSLTQFPYFRSTLLYTHFGIYNDEYYKAQSDIVTLKSEIKRCESEKKLVNLLKEKLNAYLKGYNAPNNIEILNIELDENDNEYEKIITKLQKTKNLLINLRNTRLELKESIKEIEDLEKDWNQKLLDTDIDINEKIEKTMTLEELIIEKDEIDSEILRCDRKIESCEEDYKKILESLKRYENKLKLNESHVDDILKYKGYQNTRNELIIEFAELSNVVDRCKEKIKESKSIINSYNNKKSKIKKRYYELMKNSKEYFDIKEVHNDSFKSIDTKFRGEGGNLPASTVFWHVNLLKLKYEFNRDSIRFPLIIDSPNNREIEGNKKVLIFKYIFENNISDTQIIVSSLGFDKSKFKDVKFDNLIELNNEKYNLLNRHDYEENKHILKMIIEN

SEQ ID NO: 91640 - protein, 363 aa, Clostridium sordellii; identical to SEQ ID NO: 91638

SEQ ID NO: 91641 - protein, 547 aa, Clostridium sordellii; identical to SEQ ID NO: 91639

SEQ ID NO: 91642 - protein, 354 aa, Clostridium sordellii 8483; identical to SEQ ID NO: 91530

SEQ ID NO: 91643 - protein, 557 aa, Clostridium sordellii 8483; identical to SEQ ID NO: 91523

SEQ ID NO: 91644 - protein, 379 aa, Clostridium tyrobutyricum DIVETGP
MVAKTSAQSTSPGSSKVVSKNKKIKDIAVDTSSGSMAYNRFEMQVSQTLHMAIELFDSLDYLLVLDYYDDIALFDDEKKPEVVSYYQMKTNEESISISTAISEDWLVKMYAQLEHPEWLVKELGLITNCPLKVTVKINGADGKNKNQTKTYTAEKTPFSKFNPITIDKIKHDIAQKKGISPEDVDLTKFVHIRTTLSIPKHHEIVEQELGDFLHKKYPRITMDVVKTIFGAMLDILTKRQQYELLAENALYNEVREKKGITKCDFSRVIEEAIVISIPPFDEIQRVAGLSDDDKYKASFEYTKIMSDSQSKIESFSNIFIKIRKLCSNYRKNSDECVWQYVNRLCDRLYKDNFIIESIYNRMYICILTICILINEMRRV

SEQ ID NO: 91645 - protein, 561 aa, Clostridium tyrobutyricum DIVETGP
MNEMYFKNILISDIQAQTARFQEFSKGFNVITSHDNHVGKSSLLKSIYYTLGTEVDYDPVWDKRTKLYAVTICVNGIDYRVARFQKSFAVFKGTELVLLTRSVTHGLAKKYEELFSFAVYLPNKNTKKIEMAPPAFSFMPYYIDQDKGWSGLYNSFASIDQYKQNDRIKSLYYHLNIYTKYTVELMAQRDQIKDEIEKLKKEEERIRITLESLSQETQNLLPAETLEDLERNLQIPKEQIAKLVKKAGEVRNKIQSLEITFNQHEHQLQVIKEYKNIKTDVGNTDRKILHTCPQCGYTFDEEIYKIVRSNYNIQNEDYMCQQIQLIIDSIVEELDRHKNQYVELMAALEEQENVFDESQDAYKVYVRQRGLKDSLTHFSQQLSYNSLKQSEYTDAIKNINKELRKLPNKKEVEEKYIEYVRLNIISLDAWNAAYDGNIKLLKPMKAQGTLENKIILAQFVGLFQTMEYFKSSAIRFPFVVDSPRAKEASNSSSKDILKLISEVDMLPQVILATMDYSDFGSEISHKAKITILTEKRKLLNKENYESHKDFINQLFELLKNV

SEQ ID NO: 91646 - protein, 360 aa, Listeria monocytogenes J1816; identical to SEQ ID NO: 91492

SEQ ID NO: 91647 - protein, 564 aa, Listeria monocytogenes J1816; identical to SEQ ID NO: 91495

SEQ ID NO: 91648 - protein, 360 aa, Listeria monocytogenes str. Scott A; identical to SEQ ID NO: 91492

SEQ ID NO: 91649 - protein, 564 aa, Listeria monocytogenes str. Scott A; identical to SEQ ID NO: 91495

SEQ ID NO: 91650 - protein, 360 aa, Listeria monocytogenes ATCC 19117; identical to SEQ ID NO: 91492

SEQ ID NO: 91651 - protein, 564 aa, Listeria monocytogenes ATCC 19117; identical to SEQ ID NO: 91495

SEQ ID NO: 91652 - protein, 360 aa, Listeria monocytogenes SLCC2378; identical to SEQ ID NO: 91492

SEQ ID NO: 91653 - protein, 564 aa, Listeria monocytogenes SLCC2378
MNTLTFNKLYIFSTFENKAKYIEFSNGKNIITTEDDVIGNKKGKSTILKNLYYTMGADCYFEDKWDVQKKISVLEFSVNKTSYIIFRQDKLFKIFDLKKNLLFKTLKRKELSTFLEKIFKFTVKLPNRHTDKLEIAPPAYFYLLNYTDQDKMNGSSFDSFRNLGEYSNFKLNTLYSHFGILDDRYYEVMKLVEQLSEQIKALDDECQLFYKMLEKIENELVDKVSFPTNFDVLQQEVDSTKNQYEKIVHSLQLTKNRLINQRNDNYEVKQELANLRKIIRKNDKDKKTINSHTCPKCHSIITDNLELKINTLNNEEDFLFLANELEKESLKVEANIYKEEKKYQQLLDTLKKYEDKLALSSKEISNVLKHKGLMEVRDKLIMDIGNSQVNLKQAQESLKEQRKILKEYLELKKQINETYYELMLNDKIHFNLEELDSDKFKKIDSNISAGGSNKPINTIVWYFNLLKVKNKFNPDAIRLPIVLDSPANAELDRDSKHTLLKYIFEESDKDSQLIVSTIGFSTSDFKEEHFDNVIELSNSKYELLNTEDYELYKELCKDLVLINE

SEQ ID NO: 91654 - protein, 315 aa, Listeria monocytogenes; identical to SEQ ID NO: 91490

SEQ ID NO: 91655 - protein, 564 aa, Listeria monocytogenes; identical to SEQ ID NO: 91653

SEQ ID NO: 91656 - protein, 360 aa, Listeria monocytogenes WSLC1042; identical to SEQ ID NO: 91492

SEQ ID NO: 91657 - protein, 564 aa, Listeria monocytogenes WSLC1042; identical to SEQ ID NO: 91653

SEQ ID NO: 91658 - protein, 360 aa, Listeria monocytogenes Lm_1824; identical to SEQ ID NO: 91492

SEQ ID NO: 91659 - protein, 564 aa, Listeria monocytogenes Lm_1824; identical to SEQ ID NO: 91495

SEQ ID NO: 91660 - protein, 360 aa, Listeria monocytogenes; identical to SEQ ID NO: 91492

SEQ ID NO: 91661 - protein, 564 aa, Listeria monocytogenes; identical to SEQ ID NO: 91495

SEQ ID NO: 91662 - protein, 360 aa, Listeria monocytogenes; identical to SEQ ID NO: 91492

SEQ ID NO: 91663 - protein, 564 aa, Listeria monocytogenes; identical to SEQ ID NO: 91495

SEQ ID NO: 91664 - protein, 360 aa, Listeria monocytogenes; identical to SEQ ID NO: 91492

SEQ ID NO: 91665 - protein, 564 aa, Listeria monocytogenes; identical to SEQ ID NO: 91495

SEQ ID NO: 91666 - protein, 360 aa, Listeria monocytogenes; identical to SEQ ID NO: 91492

SEQ ID NO: 91667 - protein, 147 aa, Listeria monocytogenes
MNTLTFNKLYIFSTFENKAKYIEFSNGKNIITTEDDVIGNKKGKSTILKNLYYTMGADCYFEDKWDVQKKISVLEFSVNKTSYIIFRQDKLFKIFDLKKNLLFKTLKRKELSTFLEKIFKFTVKLPNRHTDKLEIAPPAYFYLLNYT

SEQ ID NO: 91668 - protein, 360 aa, Listeria monocytogenes; identical to SEQ ID NO: 91492

SEQ ID NO: 91669 - protein, 564 aa, Listeria monocytogenes; identical to SEQ ID NO: 91495

SEQ ID NO: 91670 - protein, 360 aa, Listeria monocytogenes; identical to SEQ ID NO: 91492

SEQ ID NO: 91671 - protein, 564 aa, Listeria monocytogenes; identical to SEQ ID NO: 91495

SEQ ID NO: 91672 - protein, 360 aa, Listeria monocytogenes; identical to SEQ ID NO: 91492

SEQ ID NO: 91673 - protein, 564 aa, Listeria monocytogenes; identical to SEQ ID NO: 91495

SEQ ID NO: 91674 - protein, 360 aa, Listeria monocytogenes; identical to SEQ ID NO: 91492

SEQ ID NO: 91675 - protein, 564 aa, Listeria monocytogenes; identical to SEQ ID NO: 91495

SEQ ID NO: 91676 - protein, 360 aa, Listeria monocytogenes; identical to SEQ ID NO: 91492

SEQ ID NO: 91677 - protein, 564 aa, Listeria monocytogenes; identical to SEQ ID NO: 91495

SEQ ID NO: 91678 - protein, 360 aa, Listeria monocytogenes; identical to SEQ ID NO: 91492

SEQ ID NO: 91679 - protein, 564 aa, Listeria monocytogenes; identical to SEQ ID NO: 91495

SEQ ID NO: 91680 - protein, 360 aa, Listeria monocytogenes; identical to SEQ ID NO: 91492

SEQ ID NO: 91681 - protein, 564 aa, Listeria monocytogenes; identical to SEQ ID NO: 91495

SEQ ID NO: 91682 - protein, 360 aa, Listeria monocytogenes; identical to SEQ ID NO: 91492

SEQ ID NO: 91683 - protein, 564 aa, Listeria monocytogenes; identical to SEQ ID NO: 91495

SEQ ID NO: 91684 - protein, 360 aa, Listeria monocytogenes; identical to SEQ ID NO: 91492

SEQ ID NO: 91685 - protein, 564 aa, Listeria monocytogenes; identical to SEQ ID NO: 91495

SEQ ID NO: 91686 - protein, 360 aa, Listeria monocytogenes; identical to SEQ ID NO: 91492

SEQ ID NO: 91687 - protein, 564 aa, Listeria monocytogenes; identical to SEQ ID NO: 91495

SEQ ID NO: 91688 - protein, 360 aa, Listeria monocytogenes; identical to SEQ ID NO: 91492

SEQ ID NO: 91689 - protein, 564 aa, Listeria monocytogenes; identical to SEQ ID NO: 91495

SEQ ID NO: 91690 - protein, 360 aa, Listeria monocytogenes; identical to SEQ ID NO: 91492

SEQ ID NO: 91691 - protein, 564 aa, Listeria monocytogenes; identical to SEQ ID NO: 91495

SEQ ID NO: 91692 - protein, 360 aa, Listeria monocytogenes; identical to SEQ ID NO: 91492

SEQ ID NO: 91693 - protein, 564 aa, Listeria monocytogenes; identical to SEQ ID NO: 91495

SEQ ID NO: 91694 - protein, 360 aa, Listeria monocytogenes; identical to SEQ ID NO: 91492

SEQ ID NO: 91695 - protein, 564 aa, Listeria monocytogenes; identical to SEQ ID NO: 91495

SEQ ID NO: 91696 - protein, 360 aa, Listeria monocytogenes; identical to SEQ ID NO: 91492

SEQ ID NO: 91697 - protein, 564 aa, Listeria monocytogenes; identical to SEQ ID NO: 91495

SEQ ID NO: 91698 - protein, 360 aa, Listeria monocytogenes; identical to SEQ ID NO: 91492

SEQ ID NO: 91699 - protein, 564 aa, Listeria monocytogenes; identical to SEQ ID NO: 91495

SEQ ID NO: 91700 - protein, 360 aa, Listeria monocytogenes; identical to SEQ ID NO: 91492

SEQ ID NO: 91701 - protein, 564 aa, Listeria monocytogenes; identical to SEQ ID NO: 91495

SEQ ID NO: 91702 - protein, 360 aa, Listeria monocytogenes; identical to SEQ ID NO: 91492

SEQ ID NO: 91703 - protein, 564 aa, Listeria monocytogenes; identical to SEQ ID NO: 91495

SEQ ID NO: 91704 - protein, 360 aa, Listeria monocytogenes; identical to SEQ ID NO: 91492

SEQ ID NO: 91705 - protein, 564 aa, Listeria monocytogenes; identical to SEQ ID NO: 91495

SEQ ID NO: 91706 - protein, 360 aa, Listeria monocytogenes; identical to SEQ ID NO: 91492

SEQ ID NO: 91707 - protein, 564 aa, Listeria monocytogenes; identical to SEQ ID NO: 91495

SEQ ID NO: 91708 - protein, 360 aa, Listeria monocytogenes; identical to SEQ ID NO: 91492

SEQ ID NO: 91709 - protein, 564 aa, Listeria monocytogenes; identical to SEQ ID NO: 91495

SEQ ID NO: 91710 - protein, 360 aa, Listeria monocytogenes; identical to SEQ ID NO: 91492

SEQ ID NO: 91711 - protein, 564 aa, Listeria monocytogenes; identical to SEQ ID NO: 91495

SEQ ID NO: 91712 - protein, 360 aa, Listeria monocytogenes; identical to SEQ ID NO: 91492

SEQ ID NO: 91713 - protein, 564 aa, Listeria monocytogenes; identical to SEQ ID NO: 91495

SEQ ID NO: 91714 - protein, 360 aa, Listeria monocytogenes; identical to SEQ ID NO: 91492

SEQ ID NO: 91715 - protein, 564 aa, Listeria monocytogenes; identical to SEQ ID NO: 91495

SEQ ID NO: 91716 - protein, 360 aa, Listeria monocytogenes; identical to SEQ ID NO: 91492

SEQ ID NO: 91717 - protein, 564 aa, Listeria monocytogenes; identical to SEQ ID NO: 91495

SEQ ID NO: 91718 - protein, 360 aa, Listeria monocytogenes; identical to SEQ ID NO: 91492

SEQ ID NO: 91719 - protein, 564 aa, Listeria monocytogenes; identical to SEQ ID NO: 91495

SEQ ID NO: 91720 - protein, 360 aa, Listeria monocytogenes
MSNEAIYMKLPFDLSGSRSKNRFRYEILWGLSKLFDIYNENESFVMVFDYACDIEVHKDTGLDFYQVKSKKDGAVYTQGALLKKKKLEEEEKSFSILGRLYSLANNQNENIHVNLVSNKPFQDSSKKNHTTIENLDFNNLDEEVKKTIESKLQEELGSDVTPDMSKISFIYTSIDLFSPDDTLRGKTSKFFFELTGSEPNKPNALYNLLVETISEKACYELQLDCYSDILNRKGVSKDDIEKIISLYSEKTDRAVEKASVFIDTNINKPIKRLKMKTMLGKVVSDIESGNRLVLQNEELIVQSIFSNLEKYDVEETVFIDLLVSEYSKLFTIEYSEDYRYAFFLLILMKVEENIYEYSDI

SEQ ID NO: 91721 - protein, 564 aa, Listeria monocytogenes
MNTLTFNKLYIFSTFENKAKYIEFTNGKNIITTEDDIIGNKKGKSTILKNLYYTMGADCYFEDKWDVQKKISILEFSVNKASYIIFRQDKLFKIFDLKKNLLFKTLKRKELSTFLEKIFKFTVKLPNRYTDKLEIAPPAYFYLLNYIDQDKMNGSSFDSFRNLGEYSNFKLNTLYSHFGILDDRYYEVMKLVEQLSEQLKVLDEECQLFYKMLEKIENELVDKVSFPTNFDVLQQEVESTKNQYEKIVHSLQLTKNRLINQRNDNYEVKQELANLRKIIRKNDKDKKVINSHTCPKCHSIITDNLELKINTLNNEEDFLFLANELEKESLNVEANIYKEEKNYQRLLDTLKNYEDKLELNSKEISSVLKHKGLMEVRDKLIMDIGNSQVNLKQAQGSLKEQRKILKEYLELKKQINETYYELMLNDKIHFNLEELDSDKFKKIDSNISAGGSNKPINTIVWYFNLLKVKNKFNPDAIRLPIVLDSPANAELDRDSKHTLLKYIFEESDKDSQLIVSTIGFSTSDFKEEHFDNVIELSNSKYELLNTEDYELYKELCKDLVLINE

SEQ ID NO: 91722 - protein, 360 aa, Listeria monocytogenes; identical to SEQ ID NO: 91492

SEQ ID NO: 91723 - protein, 564 aa, Listeria monocytogenes; identical to SEQ ID NO: 91495

SEQ ID NO: 91724 - protein, 360 aa, Listeria monocytogenes; identical to SEQ ID NO: 91492

SEQ ID NO: 91725 - protein, 564 aa, Listeria monocytogenes; identical to SEQ ID NO: 91495

SEQ ID NO: 91726 - protein, 360 aa, Listeria monocytogenes; identical to SEQ ID NO: 91492

SEQ ID NO: 91727 - protein, 564 aa, Listeria monocytogenes; identical to SEQ ID NO: 91653

SEQ ID NO: 91728 - protein, 360 aa, Listeria monocytogenes ATCC 19117; identical to SEQ ID NO: 91492

SEQ ID NO: 91729 - protein, 564 aa, Listeria monocytogenes ATCC 19117; identical to SEQ ID NO: 91495

SEQ ID NO: 91730 - protein, 360 aa, Listeria monocytogenes; identical to SEQ ID NO: 91492

SEQ ID NO: 91731 - protein, 564 aa, Listeria monocytogenes; identical to SEQ ID NO: 91495

SEQ ID NO: 91732 - protein, 360 aa, Listeria monocytogenes; identical to SEQ ID NO: 91492

SEQ ID NO: 91733 - protein, 564 aa, Listeria monocytogenes; identical to SEQ ID NO: 91495

SEQ ID NO: 91734 - protein, 360 aa, Listeria monocytogenes; identical to SEQ ID NO: 91492

SEQ ID NO: 91735 - protein, 564 aa, Listeria monocytogenes; identical to SEQ ID NO: 91495

SEQ ID NO: 91736 - protein, 360 aa, Listeria monocytogenes; identical to SEQ ID NO: 91492

SEQ ID NO: 91737 - protein, 564 aa, Listeria monocytogenes; identical to SEQ ID NO: 91495

SEQ ID NO: 91738 - protein, 360 aa, Listeria monocytogenes; identical to SEQ ID NO: 91492

SEQ ID NO: 91739 - protein, 564 aa, Listeria monocytogenes; identical to SEQ ID NO: 91495

SEQ ID NO: 91740 - protein, 360 aa, Listeria monocytogenes; identical to SEQ ID NO: 91492

SEQ ID NO: 91741 - protein, 564 aa, Listeria monocytogenes; identical to SEQ ID NO: 91495

SEQ ID NO: 91742 - protein, 360 aa, Listeria monocytogenes; identical to SEQ ID NO: 91720

SEQ ID NO: 91743 - protein, 564 aa, Listeria monocytogenes; identical to SEQ ID NO: 91721

SEQ ID NO: 91744 - protein, 360 aa, Listeria monocytogenes; identical to SEQ ID NO: 91492

SEQ ID NO: 91745 - protein, 564 aa, Listeria monocytogenes; identical to SEQ ID NO: 91495

SEQ ID NO: 91746 - protein, 360 aa, Listeria monocytogenes; identical to SEQ ID NO: 91492

SEQ ID NO: 91747 - protein, 564 aa, Listeria monocytogenes; identical to SEQ ID NO: 91495

SEQ ID NO: 91748 - protein, 360 aa, Listeria monocytogenes; identical to SEQ ID NO: 91492

SEQ ID NO: 91749 - protein, 564 aa, Listeria monocytogenes; identical to SEQ ID NO: 91495

SEQ ID NO: 91750 - protein, 360 aa, Listeria monocytogenes; identical to SEQ ID NO: 91492

SEQ ID NO: 91751 - protein, 564 aa, Listeria monocytogenes; identical to SEQ ID NO: 91495

SEQ ID NO: 91752 - protein, 360 aa, Listeria monocytogenes; identical to SEQ ID NO: 91720

SEQ ID NO: 91753 - protein, 564 aa, Listeria monocytogenes; identical to SEQ ID NO: 91721

SEQ ID NO: 91754 - protein, 360 aa, Listeria monocytogenes; identical to SEQ ID NO: 91492

SEQ ID NO: 91755 - protein, 564 aa, Listeria monocytogenes; identical to SEQ ID NO: 91495

SEQ ID NO: 91756 - protein, 360 aa, Listeria monocytogenes; identical to SEQ ID NO: 91492

SEQ ID NO: 91757 - protein, 564 aa, Listeria monocytogenes; identical to SEQ ID NO: 91495

SEQ ID NO: 91758 - protein, 360 aa, Listeria monocytogenes
MSNEAIYMKLPFDLSGSRSKNRFRYEILWGLSKLFDIYNENESFVMVFDYACDIEVHKDTGFDFYQVKSKKDGAVYTQGALLKKKKLEEEEKSFSILGRLYALANNQNKNIHVNLVSNKPFQDSSKKNHTTIENLDFNNLDEEVQKTIESKLQEELGSDVTPDMSKISFIYTSIDLFSPDDTLRGKTSKFFFELTGSEPNKPNALYNLLVETISEKACYELQLNCYSDILNRKGVSKDDIEKIISLYSEKTDRAVEKASIFIDTNINKPIKRLKMKTILGKVVSDIESGNRLVLQNEELIVQSIFSNLEKYDVEETVFIDLLVSEYSKLFTIEYSEDYRYAFFLLILMKVEENIYEYSDI

SEQ ID NO: 91759 - protein, 564 aa, Listeria monocytogenes; identical to SEQ ID NO: 91495

SEQ ID NO: 91760 - protein, 360 aa, Listeria monocytogenes; identical to SEQ ID NO: 91720

SEQ ID NO: 91761 - protein, 564 aa, Listeria monocytogenes; identical to SEQ ID NO: 91721

SEQ ID NO: 91762 - protein, 360 aa, Listeria monocytogenes; identical to SEQ ID NO: 91492

SEQ ID NO: 91763 - protein, 564 aa, Listeria monocytogenes; identical to SEQ ID NO: 91495

SEQ ID NO: 91764 - protein, 360 aa, Listeria monocytogenes; identical to SEQ ID NO: 91758

SEQ ID NO: 91765 - protein, 564 aa, Listeria monocytogenes; identical to SEQ ID NO: 91495

SEQ ID NO: 91766 - protein, 360 aa, Listeria monocytogenes; identical to SEQ ID NO: 91492

SEQ ID NO: 91767 - protein, 564 aa, Listeria monocytogenes; identical to SEQ ID NO: 91495

SEQ ID NO: 91768 - protein, 360 aa, Listeria monocytogenes; identical to SEQ ID NO: 91720

SEQ ID NO: 91769 - protein, 564 aa, Listeria monocytogenes; identical to SEQ ID NO: 91721

SEQ ID NO: 91770 - protein, 360 aa, Listeria monocytogenes; identical to SEQ ID NO: 91492

SEQ ID NO: 91771 - protein, 564 aa, Listeria monocytogenes; identical to SEQ ID NO: 91495

SEQ ID NO: 91772 - protein, 360 aa, Listeria monocytogenes; identical to SEQ ID NO: 91492

SEQ ID NO: 91773 - protein, 564 aa, Listeria monocytogenes; identical to SEQ ID NO: 91495

SEQ ID NO: 91774 - protein, 360 aa, Listeria monocytogenes; identical to SEQ ID NO: 91720

SEQ ID NO: 91775 - protein, 564 aa, Listeria monocytogenes; identical to SEQ ID NO: 91721

SEQ ID NO: 91776 - protein, 360 aa, Listeria monocytogenes; identical to SEQ ID NO: 91492

SEQ ID NO: 91777 - protein, 564 aa, Listeria monocytogenes; identical to SEQ ID NO: 91495

SEQ ID NO: 91778 - protein, 360 aa, Listeria monocytogenes; identical to SEQ ID NO: 91492

SEQ ID NO: 91779 - protein, 564 aa, Listeria monocytogenes; identical to SEQ ID NO: 91495

SEQ ID NO: 91780 - protein, 317 aa, Acholeplasma laidlawii PG-8A
MLWGISKIYDLYLENPDDFFVIFDYVCDIEVGFNDTLHFYQVKTKDTSSPFSISDLIRKKSGHSYLSLLFSLKVNNQIKSINVVSNTKLSIKNTILQNSEIIPFESLEDDEKKKIEDHLKAKSILVTDLKDSFFIRSDFCINNPDTLLIGKTVEFLENAKGIKLSEPKLIYNYIKGLVDRKASYELNTIDLNDTIDKKGIKRSEIDNILNNLLGADRYREKTLSKIEALNGDYNYGEVLLLKTALSRVFKYGITSKTIEALIVDISNCINDNESTIQDLKLSEIVEYVYNCIEWDIIKDKSERKCIILLTLTKMESV

SEQ ID NO: 91781 - protein, 561 aa, Acholeplasma laidlawii PG-8A
MKNMIVNSIAIISPNSKTAKYAEFTAGINVVTSNKNINGNYVGKSSLLRSIYHTLGADGKFTTSLWEREGKYTYILDFSINNSRFRMLRFDNLFKLYDENNSLLFKVINRTDLAIELNKLFNQEIYLKNKNNEYSIAHPAFNYLLNYIDQKEIRVSEFSTFNGLNAFSAFYSDLLYSHLGVNNKQFNELKIESDELNRKIGEINKKNLMFNEMLAQIDKNKDLNSNYSEIEVLKKELQKHQDEYTKLIGEANKLKEKLLKTNDSKIEIEFAINELRKMISSDEKVLDKSIKEHTCPICNSELRDDSHAYIHKAVDVDGAKFQLLDAERELGKLSREIILTNSKYEDNLAELKRIEARVFEGNKGLEDTIKSYGMKKIKANIFEEISNNEVSKNTFIEDRKKITKLLRSLDERKKEVNKKYLTNFYDIYQKYSLGGFDLSSIDSVETKIKVDGTRVNITQVAWLCSLLKTKYEFNPDSLIYPLVFDNPNNADFDEDNERKIFNLIFDNLPENGQIITSLVGFDQNLYNSYEIKKKIMLVNPENSLLNNDDFESCLDRYSSIL

SEQ ID NO: 91782 - protein, 389 aa, Yersinia kristensenii
MVLETVPPREQSGRDSFARYRAQVRSAAIAALQMLSSTTIDRVYCDLHDDVVVRKKDENGLTYVFYQVKTRAKQNKNWTLGEVFGIQPTKKTICDKSIKESFVGKMLLHTIIFDQHCNSVIFQTNIHNDDNIEDLLSDIENGIYVNKFSRIFLERFNNIYPNEIATPLSENEIKERLSKLKFENDVHYLKDDSSYFAPLARERIYQYSEIDLTHIESSDIIIKLLELISSKSSGVIKPFTKESIENSAAVSINDLLPLLSLSKEAYEQILQGGDPKAIKSVSIIQRTLLSAGASLEDVTFCSKCKTEWDVWYRNNRHNISEIDLRFIVNKVRELLRNVQSSKDQSLTLGNLYTPLKQLLTELKSLELEFDLTTEMLFGAVFSELVKGGI

SEQ ID NO: 91783 - protein, 588 aa, Yersinia kristensenii
MRLLKLKIFPKGRDGWMSEELIFAEHITQIFGPNGCGKTPVVQSISYCLGYPNVFRNDIYERCSHAILHVITAKGEYQFKRYYEKDQLHINITEPNGVIQTFYDETSHSEFIFDLMDFNVNQLVTINSKATSPYLSLLLPIFYLDQDDGYGRIYSPPKNFIKDQFSEIVRMAFRLPPRNSVDEKREKKTAKDNLDSLDRVVQFLERQVEAVKIKSPEITKTPAQLRSEIQDLEIELEQLKGAGNSHDDSIGIYDRLISNHRTEIRDLEVQIAEILKRQNGIQKIIADINTEIETLSLNEGAKRIFLSFDEICGSNNCQLFSLSSNSYSKNLLYLKDQLKDLERNRVSDSVTLTHLQKTKLNYRTILQTIIDERNASIQKPELATLVDAISRIKNKVFELQTQLSEIEHILLLEDRLFTKITERNYAFEKHKGLTGTRSTSPELMKLKLELKELFINWLDSIHTTNISKDITYSDDFTPKLGAENITQLKGSTRIRTVLAYHAALIELLMQQPKANFRFIILDTPKQHDIENKDLDSYIKTLKVLAGLKNVQIIFSTTGYHYNGDQDDKEWNPKFPGDDHLMFFKKMTI

SEQ ID NO: 91784 - protein, 376 aa, Burkholderia pseudomallei
MASSATIVELCQVENDDDLHEFGGGHGNKGNDFARFWLISELIALTEVGTNDYLFILEYVQDVARIDDPAAPAAITLYQLKKKEGSVWDLNSLAGLTEKGKQVKPASPLAKIVKSVLGFKMLSASAEFISNARFNVKLAAGGTALQMDYLSLADLQVERQSNFRDSAAAAHSVPAATIPLQKIGLRYAPIEVNDMRVHVIGVAHGFLKKLSIAHAAQADSFVDALFAKLATASRNTSKCQTWEELVSKRGYSKKQFNDALAALQLLPDQQGRRETLLKELASALEWHTRDQMRIEVALTELARLKVTGGELSIANVDWAALRAVSATAEAESWSTAKEFEAVESCLKGFLPDESVARIRALAIYGMVQAWTSQTFA

SEQ ID NO: 91785 - protein, 118 aa, Burkholderia pseudomallei
MQSLRFNRISICSENEQKAYSETFHPRKTLLLGGNSTGKSTIIKSLFRAFDAEPTGDLRNWDYSAIVAVDFSVNDIAFTTIRRGDLKALFAASNYWEPLQAALVGMRFFRKPLAFTCN

SEQ ID NO: 91786 - protein, 362 aa, Acinetobacter haemolyticus
MENNPLNTTQRETVGIDTQLRFNYQTDWAIVYILEKILKDEEFVIFMEYHEDIICSNSIHFHENIEFEFYQLKTSRSNFTLDNICKYEIDSKSNSVLGKMILSIEDKIFKKNVKKLCLLSTSDINFKSKISTLGEYKFLKDLNKDEVEKIFKYLEIEIKKIDLGFKDIICFQKSNLPFHGSESTTKGKISEFIDKKYGDIKSNVSSIYRALWDDLRIKHDFLLPFDKWDECVNKRGLKSDEVTTILTKNIDFDLNINLRKFIENYIMNIEKDEIFAPIKISNINRYHINLITNRSPELLKEIKSLRAKIVISTDIFDATKYSTIINEIEDQVSNYPILKGFNQMKAVSIYEVLNKIYEELTK

SEQ ID NO: 91787 - protein, 556 aa, Acinetobacter haemolyticus
MKNINNSFQFQKIIILSQKEKSGTVLNIHPKTLITTKENTIGKSTLLNCLFWGIGCEVRFEEDWKLLDIIVLVEFSVSNVKYQVKRDRDSIYFFDTKGNNWIQYEKIKGEYLDKLNKILNFNILLKNQNSKSLSSVPPAFYFSSTYIEQMNGWNEIWNSFNNLGQFNLKNKREISNYLCGIYDKNYYDNKREKNNFEIDNYNITQYIDESLSVVKYFDKYDSDSISPVDNFKISAKKLNETESILEKKRKEYISSSSRLTSINNEINIILMSIGELNNDYVYSVENIEQTSIHCPTCGVEHHNSLVNRFSIIHDIDKLKLTINSLNEEKFLLERKISNILDQTNHLTEELNSHFYSDNTHQNLNNYILNQTLKPSIQNRVDMFERDKKSNSKLMRTLDRQNKIIKETNLNKVEDDLLTYFNKLCTKLKIKIFQKDNLDEIINYQGGGANQIKAMLAKRLTILKALTEHSEISTPPFVVDSLRQQDVDDNNYEKLLQTLIQETPNSVQLILAAVKNDFTNAIKADFEEIFIEDSLLNKKDYRRASYMIEHGVINSSS

SEQ ID NO: 91788 - protein, 362 aa, Photorhabdus luminescens subsp. laumondii TTO1
MGLAEALISIPQSERGGEIAQRGFDYQTCWALSQMLEYELDGKNYVFIFEYHDDVLILDDEYSPTDLTFAQVKTSESHWTAYDLHKSTKRKPISIIGKLFIHHRNFCNYSPQLLFVTNASFNLCEKNGGKSLFSASEIKDEHKISFKQAIKDQVKLDDENIDLSILKFVQSSLSLDDHITHLKGKLCDFLCNKFGDDTTLSVNVLAALLEKECRNKSKVKSADIVDFSDLISRKGFSSRAFNGVLDSLNVSNSMKPDWKMAETIFNNLGKTLFEIIPLKATFSQVCIDLNQNTKNPSTVYLEYAINLYDEASVYSDLKMYVTGIIHKIDALCPDYTLALKSGKKECIVVYSIIQKLLEGGKV

SEQ ID NO: 91789 - protein, 550 aa, Photorhabdus luminescens subsp. laumondii TTO1
MRSIYFKSAHILSLRDKKGFFFEFSPDINIITGENDTGKSSFIKSLYHTLGADVRLDKKWKDDNFVSKVVICVNNRDYAFIRHEKRISIFDITEEQEHLLVTSNSRTDIALTVRDIFDFNLELVLKETLVQGQAQPASLYLPFYIDQDNGWGTVLDSFSSLKMYKDWQKNILNFHAGVKPKEYYKLQGKINLIDIDLKEIRATLKALEAAKKRFEESFGRVLFDVDVEYYEELLERFLRKCQYLHKEETGYRIKLIKVLSQRDELVAEIEESKRQLYENNIDSLSTSASLEAKYAVLENREKLLQIIPELYDQKSVYDEQIASIKEDLKNAQRLSSELKGMLQEVKEQLTLQDVIKSQASKQVEFTFDEQINELLQKISELDVARTKLSKEIAEFDDKKRTSEINEKFKESLKFAQTELGIKDPKVGTILQYGPISKSETGSRAPRAILAYHYALLKTIEDKSTSPMLPVVIDSPKQQDPDPHTTKKLFDLCIDGLSTNNQLIIGSVSFERETDGFKTLTMTEKYSLLKVNLYDKVYQQVMPLYQKASLS

SEQ ID NO: 91790 - protein, 361 aa, Photorhabdus luminescens subsp. laumondii TTO1
MERNVLGHAQREISGATTFGKYDFQYHWALCRIIEKHKSNSDYALLIEYHEDVVIADSLYGSSAKFEFFQVKNTGKPFTSDALTKREQGAEGAKSSILGKLLSSCIGTDYEARITEIGLVSSSGFSFEQRDKKLKLDIITSGDLSVDCLSGLTEKLKDELGIALLPENLKFIVPKIKLENQEEFVIGRFAELVNEIFPNSHCNAVNIYRAIIDEIHRKGQNTYDFTVWEKMVEDKSLTSHKVKDVIAVNTTSPKFEDFEKDFEYLAKNDMKWNTLTYRKINKKIKQLFLRRIGHLSAFDMNIMRIVQQALSSVPEEDFTETRDYIESVIVKAQELNIEDQVPEHDDILCEIVYSFLKVMHE

SEQ ID NO: 91791 - protein, 577 aa, Photorhabdus luminescens subsp. laumondii TTO1
MRSLKFQRLVLISDSKRLANQFSFQKRLNLITGKDNSIGKSTLAKSLLWSLGCDPVFDEEWKSNDIKSILYFTLNNKEYFSCRGSHSIILGAIGDEAQRYINITGDFSKGFSDLVNFKMKLPNRGDGNLETPPPAYYFLPFYIDQIKSWSSPWNSFENLGQYSNWKGPLIKYFTGYLKPEHFDIEENIYEYSEIKKESAHKIEKFQSAVEVIVDNTVDSPITLDNNDFIKIQNEIKNELYDLIDYQTRLYDAQATITSNIYDLESQYALAITSANELEADYKFAVESIPTDYLECPLCGTLHDNSLPNRALLLSEKDSLLNEANSIASKIVELKSSLNSLNEDAQFITNEIERINNKYITDDDAVKKGLIAQVIDTLSTENVSKNIQIKIDNEDLNISKANSSIKELKKDQKKLLSTKEKEELNSSFMSKLLANIEALGSTGINLSKVKSPTDYKQLLGGGAAEAARGLLAYQLSVLQQIHGAKTCVVPPFVIDTPNQQEQAGYRYETVIKELMRSVPQDYQIILCAMENDALNEFKHDANVIVLNSNRLLTASQYDSLRSEYKSIQAIVTDQSDKE

SEQ ID NO: 91792 - protein, 348 aa, Mycoplasma hyosynoviae
MDRKDYYMNLPKESSGSIAKNRFKIEVLWGIGKILDEYIAKRSYTIFFDYKCDIELHNDNGIWFYQIKTLNDGNFNLNKLCKVQKNKKNSILGKILKLYSPEQNIKLAIVSNVRLKIKNRRNQFKEQCFNDFDQDALEYIEKMLCEELEVKSICFNDVFYIYDNINLLNYDETILGKLVQCFSKSERGEIPNPNAFFNLIYQTATKKASCESDFSTFEEAKKNKGFTSEEFEQLLNTHIDSSDIWIEKTREYIGQQIKMPEKRKYNIALAEIIQKQNDLSLKKIEKEIFKYIEKNNPITNDINSYLRIISEKFDKNFEVEYSEITKRVVYLLVYHIYAWGGEVNENNI

SEQ ID NO: 91793 - protein, 559 aa, Mycoplasma hyosynoviae
MKIIFKKIYIFDLKTKKAYFTEFEEGLNVITSSEKNGNERGKSLLLRSLYHTLGADCYFSKKWDQKSKVYILFLEVDGKGYVIFRSEKLFKIFNEKIELMYKCNNRWELANTLEKIFNFSIWIPNRKENKLNIAPPAYSYLINFIDQDWYKGSYFKSFKNLEQFENFKLSVIYSHLGIYNKKYFERIKEKEKIEDNIKEIKYEIEFRTKMKKELESDLVNYSCPENYEELKNEILLESQTYSSLISEMSKIRNKIIDLKNQLIQQKMIIGQITENVKSTEKDINNIWKTNKCIECNSLLNNKFKILSKKYNYIDNIHFMKNILDNENLDIKRDLEKYRTKYLNFVEQLNEYDKKISKNEIEIKEYFKFREINNLVNNLKKDLISLPREIENLNIKLNKLKEINDVKDKIKSIDIAYKTLISKLKSKFKLEELGDDNFDRISKNFSGSGSRVPLVTLIWYFTINDLKQKFNPNGAMFPMVLDSPNNAETDEDKKKEIFKYIIESSKKFDQLIFSTIGFSEDDYNIETNVNIKVLKNEKYKLLDKDTYEKNIEILNITNFA

SEQ ID NO: 91794 - protein, 348 aa, Mycoplasma hyosynoviae; identical to SEQ ID NO: 91792

SEQ ID NO: 91795 - protein, 559 aa, Mycoplasma hyosynoviae; identical to SEQ ID NO: 91793

SEQ ID NO: 91796 - protein, 348 aa, Mycoplasma hyosynoviae; identical to SEQ ID NO: 91792

SEQ ID NO: 91797 - protein, 559 aa, Mycoplasma hyosynoviae; identical to SEQ ID NO: 91793

SEQ ID NO: 91798 - protein, 348 aa, Mycoplasma hyosynoviae; identical to SEQ ID NO: 91792

SEQ ID NO: 91799 - protein, 559 aa, Mycoplasma hyosynoviae; identical to SEQ ID NO: 91793

SEQ ID NO: 91800 - protein, 348 aa, Mycoplasma hyosynoviae; identical to SEQ ID NO: 91792

SEQ ID NO: 91801 - protein, 559 aa, Mycoplasma hyosynoviae; identical to SEQ ID NO: 91793

SEQ ID NO: 91802 - protein, 348 aa, Mycoplasma hyosynoviae; identical to SEQ ID NO: 91792

SEQ ID NO: 91803 - protein, 559 aa, Mycoplasma hyosynoviae; identical to SEQ ID NO: 91793

SEQ ID NO: 91804 - protein, 348 aa, Mycoplasma hyosynoviae; identical to SEQ ID NO: 91792

SEQ ID NO: 91805 - protein, 559 aa, Mycoplasma hyosynoviae; identical to SEQ ID NO: 91793

SEQ ID NO: 91806 - protein, 342 aa, Anaerococcus tetradius
MDKEKYYMNLPKDLSGSIAKNRFRLELLWGISKIIDEHKANNEYTIIFDFKCDIELHKDDELDFYQIKTKKSGNYNSNNLCKKGKNENNSILGKLYALYSPNYNIKLAIVCNKQLKINNKEIDFPEQCFGDLDQDVLDDVRKKLCTELNLNTVCLDNVFYIFDNMDLLNPEDSIRGKLVKSFVDIKGEEPQNPNALYRLVVDSVKEKASYEFDSGTYEDVVKNKGITRSEFDKMLNAHKKESKNGINETQEYINNLSFAKRRRYNIALGNILETQQSESLRLIKIKIYNYIVEHEDSLDDIESYLKEISKLFDDDFDVEFTDDMKSVQYIMIYYMYASGGIL

SEQ ID NO: 91807 - protein, 560 aa, Anaerococcus tetradius
MNVIFDKIYIFDVVKKEAYSTDFKKGVNIITSSDIDGTDRGKSVLLRSLYHALGADSHFDSKWGEKDKVYILSFKVDDKDFSIYRSQKLFKIFNAKGDLIFTTIHRSELADFFGNLFNFSIWLPQKNTNKLVIAPPAYSFLLNFLDQDEYSGTKFNSFKSLAQFSNFKLNVIYSHLGIYNKEYFELVKHKEELELEIKSKKEEIEELIKMKDRTNLILDGFSCPETSSALENELNIETQKYSSLINEMNSVRNKLVDLRNQLVEQNITLSQISKFEKKEEKEIKTILKSKVCPECHSVLDSTLELRSKRYNHIDNALSLKDAIKTENAHIEDEILKNEGIYSNLTLVLEEHDKKICKNKKGIKDYIKFRGLNKLIDDINNDLIINSRIIDSTKEALKPLKKEFKSVKDKMKSVDENYYYLIDKLKIRFNLNELEADSYEQLSKNFCASGSNKPLSTVIWYLTLNDLKRKFNPEGTTFPMVFDSPNNAETDQEKKQALVEYIMESSDKFSQLIVSAIGFSEKDYSINSNINIKVLENEKYSLLNSEMYVHNYELLQCMNDA

SEQ ID NO: 91808 - protein, 334 aa, Anaerococcus vaginalis ATCC 51170
MNLPLDLAGSRTKNRFRVELLWGVGKLIDAYKLYDDYTIVFDFKCDIELHRDNGLDFYQVKTINRGNHSSKTLTKRKGNSRSILGTLYALYNPNHNIKLAVVCNKHLKIDSKEDLRQEVCLGELDKTVIDFIEDKLQEELKLSEVILDNVFYVCESMDLTNPHYALLGKLIEAFQEIKNEEPNNPNALFRLVSDTAQKKASYEMAITNYNDVLELKGISKNEFNKMLESHRKKSITGIEQVKDYIKTLFPSERRLYNQALTNLLEIDQSHELNVLKISIFEYIEGNIDKIRNENDLFNILNNVFDSEFPIEYTKYMKKVFYLMVFYLYTEGGDI

SEQ ID NO: 91809 - protein, 564 aa, Anaerococcus vaginalis ATCC 51170; identical to SEQ ID NO: 91479

SEQ ID NO: 91810 - protein, 333 aa, Burkholderia xenovorans LB400
MVGGCVKNQKGDAMSTTTAIIELCEVEADDDLHEFGGGHGNKGNDFARFWLINEMLALTEAGETDFLFILEYVQDIARLDKPQSPATITLYQLKKKEGNVWDLNSLAGLTAKGKQVKADSPLAKLLKSVLGFKTLAADAEFVSNTRFRVELAAGGTALSMDYVALSELTPERQTHLRDSTAARHGVAKTDIPLQRIGLRYAPIEVNDMRVHVIGAAHGMLKKLSAAHAAQADSFVDALFAKLATASRNTSKCKSWDELISKRGYSKAQFGDALADLQLLPDQQKLREDVVMELSLALSWPTRARMRIEVALTELARLKLSGGNSPSLKWTGRR

SEQ ID NO: 91811 - protein, 570 aa, Burkholderia xenovorans LB400
MQSLRFRRISICSEKEQKAYSQSFHPRKNLFLGGNSTGKSTIVKSLFRAFDAEPTGDLRGWDYSAIVAVDFSVGETEYTTVRRADLRALFRGQQLVGATTSSARWNEIFASAIGFPLQLMDREDNVRSASPSMFFLPFYINQDGSFFGNWDTFKSLKQFDASAIPHTLEYFAQVRPFKYFELKARERTAKSRYAELEIEVSTLQRTRLRLRRSVKASRVKLSTAGFEKEVHELAKLATELGARQDKVRSDIVEGQALARELGDQIRLSEAALREHEADFKSIGLATADQGTFRCPTCHVEHDASFHTFLDLAEDARELYRLKERLQQNLAAVVERLARSRRESTALRQQYTEISNILAVKKGRLTFEDVVKSHGADPAESALDAEIASVQKAAAGATELARDLKIELDGVMKDHDASAPLAVFRETFKELLVVADVVGFTNLDSWKLNKRPTDSGSPGPRSVVAYYGSLWTVMKNSDSNLPSPVVIDSPNQNAQDRKHLERVMGLLAGKTPANAQVILCAEDPNDSFQPDLTVELVRERALLESSQLDEVAARLLPLVQHAIDGLAQVRI

SEQ ID NO: 91812 - protein, 328 aa, Burkholderia xenovorans LB400
MKNQKGDAMSTTTAIIELCEVEADDDLHEFGGGHGNKGNDFARFWLINEMLALTEAGETDFLFILEYVQDIARLDKPQSPATITLYQLKKKEGNVWDLNSLAGLTAKGKQVKADSPLAKLLKSVLGFKTLAADAEFVSNTRFRVELAAGGTALSMDYVALSELTPERQTHLRDSTAARHGVAKTDIPLQRIGLRYAPIEVNDMRVHVIGAAHGMLKKLSAAHAAQADSFVDALFAKLATASRNTSKCKSWDELISKRGYSKAQFGDALADLQLLPDQQKLREDVVMELSLALSWPTRARMRIEVALTELARLKLSGGNSPSLKWTGRR

SEQ ID NO: 91813 - protein, 539 aa, Burkholderia xenovorans LB400
MGGNSTGKSTIVKSLFRAFDAEPTGDLRGWDYSAIVAVDFSVGETEYTTVRRADLRALFRGQQLVGATTSSARWNEIFASAIGFPLQLMDREDNVRSASPSMFFLPFYINQDGSFFGNWDTFKSLKQFDASAIPHTLEYFAQVRPFKYFELKARERTAKSRYAELEIEVSTLQRTRLRLRRSVKASRVKLSTAGFEKEVHELAKLATELGARQDKVRSDIVEGQALARELGDQIRLSEAALREHEADFKSIGLATADQGTFRCPTCHVEHDASFHTFLDLAEDARELYRLKERLQQNLAAVVERLARSRRESTALRQQYTEISNILAVKKGRLTFEDVVKSHGADPAESALDAEIASVQKAAAGATELARDLKIELDGVMKDHDASAPLAVFRETFKELLVVADVVGFTNLDSWKLNKRPTDSGSPGPRSVVAYYGSLWTVMKNSDSNLPSPVVIDSPNQNAQDRKHLERVMGLLAGKTPANAQVILCAEDPNDSFQPDLTVELVRERALLESSQLDEVAARLLPLVQHAIDGLAQVRI

SEQ ID NO: 91814 - protein, 374 aa, Photobacterium damselae subsp. damselae CIP 102761
MHIVTDINLKPNFAQADKQDEDAGALTFAKYWYQYNWALLHLFNQMPNFNNCSITMETHEDVMFISNIDYNETKIDLFQVKERSKSGNITSNVICRGSKDKPAIISKIIKNITKERLVKRLNSIALVSSTDYSFKLKNEDDKISSYHSVNFNHLSDEVKNEIKKAVLRDLDISEIPNFLYFIRGMQTTSKDESTLLIIGIIAKYIDSIDPNSSSKPKLIYDAITTELLKIGCSTLKYNNWDDFVKNKTITKKQIEKIIQRRTTREGFTDFESVWIKITNEMSNDANYAKLPIKSKSKMKKKVREYYGLKMTQTNLMFDSFSEKVNELFELSSKEDLYEIIIDIKSNLLKDEKYSDIFNEELLEPAILLEISENI

SEQ ID NO: 91815 - protein, 561 aa, Photobacterium damselae subsp. damselae CIP 102761
MKKIVFQQLSLISDLEKSANIFQFSQKKNLILGSKNNVGKTCLSTSIFWALGIDLKQPKSWKDLGVRTVIKFTVGCDTYHISRKEKSFVIHYPNYNKSYFDSLKSFSIAFANIINFKACIKEKSASSPTVPYTAIQLICSYIHQDTGWSELFKSFNLYYYHKNEISKAIDYFVGLKPDEYFKPQLEELPITREITKLTQKIDNISFTKEAISVFNKDNTELFNPFENYKHIKENKQLNALLYNETEIKELLLIQKKERFALKEEIKIIESACTELFKDYQFATNNIEDQIIQCPTCGTEHENNVVARFNIIDDRDKLITCKTNALNQLYILNEEIDNNKRRLNLIKNEILMFERFHNLPSLIEDKLLNDNINIFDNAIKLTFDKIIASSKLEIDTLKTKKESIKKFSNNKEQKERYKNIVNEFNDKLLTNFKKLNIEDAQVLYDKKIIYSFDVSGSDISRSILSYYKTLNDMMKEHCSVYSLPFVIDTPYQQEQDNINIDYINNFLNDWDEQQLLIFGVNNKNYQSLIDNKDSNVIMLTNKKSLLSVDMYNKITQEFNIYF

SEQ ID NO: 91816 - protein, 362 aa, Gluconobacter frateurii M-2
MPKPTLKTVASKQPRETAGPSAFRAFDFQVNVSIALVLDIFKQGKEFVALFDHHDDLVVFVGEGENSELSFYQVKSSSELTWTAKRLARRSPKGELPKSIIGKAYYNIAQFGPEIRRASILSNRPLNATLATATQSGLHDGELSIADLCSADQKAIMKSLEEDFPSGFDKRHATLLTFERVPFDLESYRATVLGRIVTMLEELDPDFVAVSSPFYTTLLAAAGECTGNKTKSTTVEELRKRVALDREAINRLIVRVQSRRKNLVEWWSSVKDEFAADGMKAIQIQRIKNMCIAYVDARRVGNRAATNLSEAIRGSIDKTAVSTIESVKEAAVALRAHGLVEPTSEPYDLQSAMIVELMEAMT

SEQ ID NO: 91817 - protein, 522 aa, Gluconobacter frateurii M-2
MKSLYETLGATPNKIDDRWKKANVSSCLEFEFAGAIWFSVKAHGVLSLFDDKGNRQFWGLRLVKDWGPKLAEFFGFKLEMVDKDGETLTPPPAYLFAPFYIDQDGSWDNTWVSFRQDFYLPESARTLADYHSGIRPDGYYAAKAELTKEKIVLSSLETAVDTLRQAMTQIEEIEGTTPIYDLQEFASECDDLVAESESLLVLQARHRRTISDLHEESHLVRAEVALLRNTLNEMRGEFDLASSLPHQVECPTCGYEYQNSLTERFALIEDEGVLSKALTEAKYKLGRLTEKELAERGKLDEISASLTRVQKILETEKQSLSLNDVLVAAGKTEAAKLLRVSLNEKIVAAEGSRNKTELLRASMSKFTERTRTTEIMKFYRSRLSMYSQELDVHLDAPEKQSIISINVARGSEGPRALLAYYYAFLYTKIKFTTSIRFPVVIDSPNQQGQDKVHLPQMLKFIFDHVPDDVQTIVATEDASGLKFEGVAIANYGEAKRQILRENEFDRVKNIFDPFFQKILAAE

SEQ ID NO: 91818 - protein, 356 aa, Pseudoalteromonas luteoviolacea 2ta16
MELAKSLIDVPQTERGGEIAQRGFDFQACWALSHMFEYELQGKEYVFVFEYHDDVLILDSENFPKKATFAQVKTNEKPWTLSKLISATKKKPISFIGKLFEQKNKFNNSDVELMFVSNAYFSFDNRNTFKADELKPEDQDALISKVSNQLSSKEALELSKLTFLTSDLSLEDHSVHLKGKICDFFESYFNDNLEINPASFARTLESACRDRAKVRSSDIRSFDELIRRKGFTSTFVKETLNNICATKILQPDWENARAIFADMGKNHIQLLSLQSTFTRISISVKSSTSVEKLYLEKADLLFDKQAVEASMIAYIAESIKSLEITLPDYSLALTEPKKECIIVYSVIKNIIGGEEL

SEQ ID NO: 91819 - protein, 546 aa, Pseudoalteromonas luteoviolacea 2ta16
MSLIHFKDISILSRRDKKGFSFEFSPTVNMIFGDNDTGKSSLIKALYFTLGGDCRIDKDWKDDDIITKVCISVKGKSYTFVRHNKRISIFSNSDDTKPIVTSSHMSAIADKVREIFDFNLQLSYKKTGKQSQANPACLYLPFYIDQDNGWHTVLSSFLGLAMYDDWQKNSLQFHSGMKPKEYYELVGEIKTIQLELEELSATLTVVLAAKKRFEESFGRVLFDIDIEYYQDLLNKFLAKCQELNEEESEFRLKLLSLLSNRDSIANEIDICRGLIENFDDYTTNDAAEKYHMFENREQILEILPQMYDEKQGLDDQINSIKEELRQSQTLSSELNSMMKEVRGELTLQDVIKSQASKEVEFTFDEQIKSLHEKIGSKTTALEALIKRQNEFTDKKRTQSINDDFKSYLSMAQEKLGIGSPIIAPLIQYGKITKSKTGSRSPRSIFAYHYGLLKTMEKHSSVNMLPIVIDSPKQQDLDTEGTEKLIALCTEDLGRNNQVIIGAVSLESNMHGYHQIELTEKYSLLKLDDYEEAYKKIMPFYEKGMCY

SEQ ID NO: 91820 - protein, 360 aa, Pseudoalteromonas rubra
MSANDAEENVVDNPLAQDAQREKSGSDTHRKYNYQYHWALCRILEAHENNDEYALFVECHDDVVITDSLNSLTAEFEFNQVKETSTKHTASSLFYKSGKNSVLAKLLLDSCGKSFSDRIKNINLVSTGGFDLKIKEKDLKLDVIKLGYLADTEIELIKEKLSKELPGIALPDKLAFVLPDLPNKSFRDTVKGRILNLLEKLSPGSHNDTGSIYRLLVEDLDQKGEDTFDYLEWERALKRKAITSTQVQDIIERNIKRTIDSDLTSSLSDVLKEYGFKSLRVRSIKHAFQRYYNRRLGTRNTQLIKLSKFIDEFELLHQDEFEEVSELEMAIRSDLPEYLKQEFNDENELIAAVLYELLSE

SEQ ID NO: 91821 - protein, 101 aa, Pseudoalteromonas rubra
MKSLIFKKLMILSEQEQKGVHLTFDRINVVIGSDNSVGKSTLVKNLFWALGCNPYFDDNWKGTESKTVIEFSVNDKVYLCARDTSRIMIGEKVNSLPYTLA

SEQ ID NO: 91822 - protein, 227 aa, Mycoplasma conjunctivae
MDKTSGSITYNRLRFQIAQSMLFIIDFYDNLEDFILTLDYFDDITFFDNEEMDGSVSYFQLKTNEQVTITYIIKKGWISKLYKHLKSDNKDNVSKISLIVSSNIKDKQKKIVEYGEKKFGDLPQNVKEEIIKSIATNYKCNESEVDLSKFSIIKTVLTKDTYFQLAENKLTTFLEKINPDITLRTSKLIFNSLWAWMDSKQAFEFPPGSVVSYDEVRSKKKYFKKRF

SEQ ID NO: 91823 - protein, 559 aa, Mycoplasma conjunctivae
MKKFCITRIEIYDVIENEAFFTNFTKGINVVTGRDNHVGKSSLLKSIYYSFGCNVDYDSAWDKKSKLVSVNFMLDNKLYKISRLDNKYLLQDSEGQILLRTKEVSKKLAPFLSELFEMEIYLTNKDKKVELAPPVFFFLPYYIDQDKGWSNEPFNSFLNLDQFKKTERLKCLYYHLGLYNKETFKLTNEIENLKDKKIRFEHLNTKYTDFKEILEDEIEVLEVLNNNELYKSLDELRNNITEKLVKLDEVKNKINISKSTLSNLEYNLEILKNNFKHQDNINFITCPRCGFTKRKSFPYKIENIIIGEFSRHNTEFSIYELNKMIDEQKKNINDYTDIYTDLYTEISIKKQKVENNDVFTKFINGKGRENIKLDFDKKIANNAIQINDLKTEIRSKKKYLNEKKDPKQLNEWYEKEVKNFLHGLNAWDERASSKITLIKPFKGQGNLAVKSIVASYLSLFKVMEISNTKVTKFTFIVDSPRTKEASENSSIEILSKITDISNLEQVIIATVDFDFYSGDIKSDVNKIVLKDQKHLLNKTFYTELNNGEFIKFMKNSKNW

SEQ ID NO: 91824 - protein, 288 aa, Pseudomonas amygdali pv. lachrymans str. M302278
DKTMHEIIDKIITLGAVLKSDPNVLHPEYWHKLNFLTNAAISFNDGAKKERKSILVNEANIKLEYKSIDEKIQKNIKKLVKNFNSKADINFPELDFFALNYIDLPKTYKAQKEALIGLFENTFGYSVKDHKAAIETLLSMFRDIELKFNQGNIPSLTAKEKQLCGNHIKNAFNIITSKQKAYDFWRAEGKELCKLIKISVYDQRNHEFLLSNCFDYFKDLTQFEHQKILQFVSSQTLDTHKYFDELSYIEHLFKKFKASHSNQLTETEVKFAIIAAYVETREPNENDI

SEQ ID NO: 91825 - protein, 575 aa, Pseudomonas amygdali pv. lachrymans str. M302278
MKTTFKFDSFFGYSETNNKYFHTIFHPHINIIQGPNTSGKSTFFQLLLFTFGINDNNEQLSDILKEDAFFRLDCTISHDQKSEKITFIRDGDTLVIKPDSKPLLRFHGISANHSAEHIKLKAILHEIFGFDLYLESKGEYKAAPIEAIFLPYYVAQSVGWVYLRKSFSALDYYRNLKEDYLDYYLGITSHGDRVAKQTLESEKMSIIQKITFLRSLENNDIDIQITKLTDESFLEESKNYISNYVERQSSLAMNEKNYISHCNTLSQLSARKSVLAKVRRNSEKQSPALDTCPTCSQRLPASLEDVYSHQQAVNDTIIEQVKVKENLKEIQGKINSLKKIISTAKDRLSFEYEILKKVSAQNINFETWIQHKATARLTTEIKTKTIALTERLTVINSALAGYNTDESIIAERANKENQFRRIFVKYLDELNVLIPTDKRYLDLYKISAFPTQGVELHKTVMAYHLAINKIFESNKTTHRLPLILDAIFKEDIDPINKNNIVQFLSKNRPKDTQLFISMAQLNNLNTPSSTGQDFSNANSKKIMIGDDATKRSLFKKYTGELKNHLDETFSLLNFT

SEQ ID NO: 91826 - protein, 400 aa, Pseudomonas synxantha
MPSLVAKVHREDALSISAGAAELLLVANKPGLTETGGGHGAKGVDFQRWWAVLRMVEMERANEPDFLLLFETVQDVTELNSVNTPTRARVYQVKKKDRGEWTWSVLTGTTAPPKKKSSTTASKAVTPTFTKVSDSALGKLQLSLAAFNKLPVEAYFISNAGCDIPLAAGGNAATSMPCSLADFAPEHSQLLAQALHSLSADGSPVPDLTKLKLKRVAIHPDEPSSYVIKSALELLTQRSPPHAGQAASFVESLVTKISPLGRHTDTCSSFGDLVKQRGFARHEFISALGALETIPDHSAYLNDWLTQLQSEGMDFMVVTAMRAEAARVVREQLTGATLPVVQSLHDFCDVWLDANARGLGLRPYFEAGLAALRQDFSSFRDAELLARFAMRAIKKCVDPN

SEQ ID NO: 91827 - protein, 576 aa, Pseudomonas synxantha
MKSFRFENIWLLSHRDRKARHVNFHPKKNLLRGRNHTGKTSLIRSLFETLGAKPQGKLESWDDNTASLLEFSIDGRHFFALHQNGRRALFNINREMIVATSKFGEWSQAFCDVTDFNLVFTDKKESEIRPADPACFFLPFYVNQDGSWQSEWNTFGGLKRFSSPWSAILEYFTGVCPPEYYRARAERVQESKVLEEHRREYKLLERTIERFSRTLPLSGPKLNPENFADEIDLLTQEVNELNQRQEMLRSAAVREQDLLSSLEQQIRLADDALAAYDHDAKYLRTGDSEPLVCPTCNAEHTKSFLDLLNFAEDARVLRELAGRLRDDANEVRHRCRTALAELSTLNENYQRISTLLGTSKGELKFQDVVGSMGAESAFAAFEAERKLLQEAINKALGAVDSLDEKMKSLRAVKRTRAILEDFRSYYVTGRVALQLPPVDASKMKLTSRPDLSGSGGPRSILAYYAALWRTCQGVTGTYDIPVVIDSPNQQAQDDINLPAVLQFIAKELPEDMQLIVGLETPTDFPFDREIHLDVKYSMLREDYWDEAERIIEPLLKKMYATMKSDVEESSDDVSEQ

SEQ ID NO: 91828 - protein, 361 aa, Acinetobacter sp. SH024; identical to SEQ ID NO: 91004

SEQ ID NO: 91829 - protein, 519 aa, Acinetobacter sp. SH024
MITTKGNTIGKSTLLNCLFWALGCEVRFEEDWPELDTVVLIEFSINNKIYKVKRDSQAIHLQEDDEQWATYEKITGSYLDRLNSILNFNVLLKNSKAKKLSKVPPAFYFASTYIEQMSGWNEIWNSFNNLGQFDKNNKFELSKYLCGVLNKNYYDNKLNQNFYELKNFDISKEILKTNEVSDYFRSKRAISPQIDLQDKIKNSARSVVMAERKILEKKNEYINISSRMAAIDNELQIIQVAIGEIEQDYNYSIENIETTSIFCPTCGVEHKNDLVNRFSLIHDQNRLMEQIKNLQNEKSVLINKSYNLTNSIDSFYQEIEGAFKEESFNEDINQLFISKSLIPGLEEKVASDNREFRANTKEIRKIRNENKIIENSNLEEIEKDVVEYFNSLCTDLNIKMYLKHNLYDILNYYSGGANQVKAMLAKRLTILNSIYSHAELSTPPFIIDSPRQQDIDSDNYHNMLNILISNTPDDVQLIIAAVQNNFIDSIKGNFEEINLESTLLTAEEYELANFLISHS

SEQ ID NO: 91830 - protein, 361 aa, Acinetobacter pittii; identical to SEQ ID NO: 91004

SEQ ID NO: 91831 - protein, 358 aa, Acinetobacter pittii
MKNTSNSFQFQKIIIVSRTEKSGRVLKIFPRTLITTKGNTIGKSTLLNCLFWALGCEVRFEEDWPELDTVVLIEFSINNKIYKVKRDSQAIHLQEDDEQWATYEKITGSYLDRLNSILNFNVLLKNSKAKKLSKVPPAFYFASTYIEQMSGWNEIWNSFNNLGQFDKNNKFELSKYLCGVLNKNYYDNKLNQNFYELKNFDISKEILKTNEVSDYFRSKRAISPQIDLQDKIKNSARSVVMAERKILEKKNEYINISSRMAAIDNELQIIQVAIGEIEQDYNYSIENIETTSIFCPTCGVEHKNDLVNRFSLIHDQNRLMEQIKNLQNEKSVLINKSYNLTNSIDSFYQEIEGGRIQT

SEQ ID NO: 91832 - protein, 361 aa, Acinetobacter pittii; identical to SEQ ID NO: 91004

SEQ ID NO: 91833 - protein, 232 aa, Acinetobacter pittii
MEQIKNLQNEKSVLINKSYNLTNSIDSFYQEIEGAFKEESFNEDINQLFISKSLIPGLEEKVASDNREFRANTKEIRKIRNENKIIENSNLEEIEKDVVEYFNSLCTDLNIKMYLKHNLYDILNYYSGGANQVKAMLAKRLTILNSIYSHAELSTPPFIIDSPRQQDIESDNYHNMLNILISNTPDDVQLIIAAVQNNFIDSIKGNFEEINLESTLLTAEEYELANFLISHS

SEQ ID NO: 91834 - protein, 361 aa, Acinetobacter pittii; identical to SEQ ID NO: 91004

SEQ ID NO: 91835 - protein, 232 aa, Acinetobacter pittii
MEQIKNLQNEKSVLINKSYNLTNSIDSFYQEIEGAFKEESFNEDINQLFISKSLIPGLEEKVASDNREFRANTKEIRKIRNENKIIENSNLEEIEKDVVEYFNSLCTDLNIKMYLKHNLYDILNYYSGGANQVKAMLAKRLTILNSIYSHAELSTPPFIIDSPRQQDIDSDNYHNMLNILISNTPDDVQLIIAAVQNNFIDSIKGNFEEINLESTLLTAEEYELANFLISHS

SEQ ID NO: 91836 - protein, 303 aa, Acinetobacter pittii
MFEFADDVEFEFYQIKTTEANFTIDNLCKYEVGGNSIIGKMILGVENKLFKKNVKKLCLLTISDINFKTKIKILGDQCHFTNLEENEIKDILDRLTNELKIVDPIYQNILCFQKSELPFPSSQLSAKGKIAEFIQSKHGDVRSDISSIYRVLWDDLKIKYEYKIPFDQWNECVQKRGLNSEEVKKILATHISLDLSENLKKFIENYINKLSGDDLLTPIRINLINNYYTYLLVNRSPEIIKFLEEMRSKISIPSNILDLNEIQREITKIDLIINDNLQFKEFNRMQSVAIYEVLNKVYEQFTK

SEQ ID NO: 91837 - protein, 280 aa, Acinetobacter pittii
MKNTSNSFQFQKIIIVSRTEKSGRVLKIFPRTLITTKGNTIGKSTLLNCLFWALGCEVRFEEDWPELDTVVLIEFSINNKIYKVKRDSQAIHLQEDDEQWATYEKITGSYLDRLNSILNFNVLLKNSKAKKLSKVPPAFYFASTYIEQMSGWNEIWNSFNNLGQFDKNNKFELSKYLCGVLNKNYYDNKLNQNFYELKNFDISKEILKTNEVSDYFRSKRAISPQIDLQDKIKNSARSVVMAERKILEKKNEYINISSRMAAIDNELQIIQVAIGEIEQD

SEQ ID NO: 91838 - protein, 361 aa, Acinetobacter pittii; identical to SEQ ID NO: 91004

SEQ ID NO: 91839 - protein, 232 aa, Acinetobacter pittii; identical to SEQ ID NO: 91835

SEQ ID NO: 91840 - protein, 347 aa, Brachyspira pilosicoli 95/1000
MCMPKKIDKKSGSISYNRFEYQITQALNLAISLYDKYNYLIILEHYDDITLFENNNNIKDIHHYQVKTKNVQYTKFEKILKEGFLDNLIGHLNDNNINDVKEISLIINCRIIIDKKKYEIDTIIKPDTTNNILSKIKDHYKDNDNIDFLEKTMNLIISDISLQNHIELRKARIREFVSHKYQNAGYDALNSVVLRLETLFTKMQSDESLTNDSKFEDVKKKKGFSKDDFNDIIKNAIKISIPEFHKIEEYAKFEEKEIDDYKLSYIDIQSGISLKKDIYNFSLQLVENYIQGNELNDLDDIIKYSKQCKECILNNNDNLILKSYDNTKYIEMLCIILLCNKYTKELQ

SEQ ID NO: 91841 - protein, 559 aa, Brachyspira pilosicoli 95/1000
MKTVILNNILIVDTDEKKAKFQKFIDGINIITSIDNSCGKSCLIKSIYYCFGANTSYDSKWNEKNKLIIINFQFNNDKYKICRYYHKYLIFKNNDLIESTKNTSILSNSFENIFNFSIYLKSKKDKNGNYNYIIAPPAFTLLPFYIDQDKRDTVFEPFEQLTQFDKNERDKALFYHLGIYDKTSISLEENKNKIDKDISKNNNELEKLTYTKNILDEESNNIIYDINNITDIENNLLYDKKELENVINLLSESRNKIQKLQSMIIKYNNKLLYLEENSKIYRDVCEDIIVCSNCGHISNIESILKKEYILANKNIIKKQIKIFIVNTKLQLNKEENNYLEINNKLKSLENTISNNNNNFEIYTKIKGTEKIKNNINDNINKLNITLENNIKESKNIKKKLKEIDNNKKNVDNLFKNYFKKLSNESNIRPLIEFNDISLLRKKSDLSGFAGEAYSIIMHISFILTMKESNNNCIIFPLLIDSPRSMEASKNNSFNILKLITDKIEFIPQIIISTVDAKTIYTPNKNDNLIELKDNLLLNENDYSSNIENINYIKELMDRI

SEQ ID NO: 91842 - protein, 230 aa, Brachyspira pilosicoli B2904
MPKKIDKKSGSISYNRFEYQITQALNLAISLYDKYNYLIILEHYDDITLFENNNNIKDIHHYQVKTKNVQYTKFEKILKEGFLDNLIGHLNDNNINDVKEISLIINCRIIIDKKKYEIDTIIKPDTTNNILSKIKDHYKDNDNIDFLEKTMNLIISDISLQNHIELRKARIREFVSHKYQNAGYDALNSVVLRLETLFTKMQSDESLTNDSKFEDVKKRKVFQKMILMIL

SEQ ID NO: 91843 - protein, 559 aa, Brachyspira pilosicoli B2904
MKTVILNNILIVDTDEKKAKFQKFIDGINIITSIDNSCGKSCLIKSIYYCFGANTSYDSKWNEKNKLIIINFQFNNDKYKICRYYHKYLIFKNNDLIESTKNTSILSNSFENIFNFSIYLKSKKDKNGNYNYIIAPPAFTLLPFYIDQDKRDTVFEPFEQLTQFDKNERDKALFYHLGIYDKTSISLEENKNKIDKDISKNNNELEKLTYTKNILDEESNNIIYDINNITDIENNLLYDKKELENVINLLSESRNKIQKLQSMIIKYNNKLLYLEENSKIYRDVCEDIIVCSNCGHISNIESILKKEYILANKNIIKKQIKIFIVNTKLQLNKEENNYLEINNKLKSLENTISNNNNNFEIYTKIKGTEKIKNNINDNINKLNITLENNIKESKNIKKKLKEIDNNKKNVDNLFKNYFKKLSNESNIRPLIEFNDISLLRKKSDLSGFAGEAYSIIMHISFILTMKESNNNCIIFPLLIDSPRSMEASKNNSFNILKLITDKIEFIPQIIISTVDAKTIYTPNENDNLIELKDNLLLNENDYSSNIENINYIKELMDRI

SEQ ID NO: 91844 - protein, 327 aa, Asanoa ferruginea
MALLFQHHGTATDYAIVFEFHDDVALFDDPAHPTKVRFYQVKTKTTVGGWTLQKLTNREKTIKKKVANIKPSIIDKMYDSVAKFDPNVLSVEFVSNQPCSFNATKATFSFQACGTADFQKIVASIQSAYPGATEAQVGLLGYRMTDLSVGDAGSHIKGKLHQFVCDQLGEVSFNLETLYRAIIDDCRRKAAFTGVNANFAEVVRNKGITKDDVQTWLNTIQREHRAPEWSAIMPLMAGYSYLENLRIGQQYEIVRSAVLNPGDAALFRVRTAVRKAIAAFDPHAPHTLCQLIDEVFTSSQEVAQKYLTPYSPERLKAIIAYELHTNE

SEQ ID NO: 91845 - protein, 287 aa, Asanoa ferruginea
MEDVADQKITCPTCHAIYDNDFAHRFGLIGDADACRGFLASARAALDEVERDIDRQKTLSAEFQGQAKKIEAILAETRGTVKLQDMLKDESQRLLDNTIAAERDAIQEGIAGWIGKEIEATELMNDYSSPKRKKEILTFYRGKLTSFAQELGVEFVDAVGKAVAPKINETGSYGTRAIIAYHYALLHTIQKFSSSCLAPIIFDTPLQQDQDKENAGAILRFIRDHRPSDMQLILGTVSLHGVDYPGRKFEPDEEFNLLRSDEYEAVSTYVAPLFNRMMRADDGRPLL

SEQ ID NO: 91846 - protein, 389 aa, Pseudomonas coronafaciens pv. zizaniae
MLDTKKAREQNGRDSFSRYRAQVRSAAVASLSILEGGTVDRVYCDLHDDFVIRKKDGEGFTYIFYQVKTKGKQNHNWTINEVFGLNTQLRDQSKQNVDAFKGSFVGKLLLHTVVFDQYCNSVIFQTNVNNSDEVEDLLSDIESGIFAHKFSKVMLDRFNECFGENVNSFSPEQVKSMLSKLSFESDVSFLKEGDNYFELIVKEKIYEFSEIELERAEFREILLRLLELVEKKSSGVIKTWDANSIESCAGISVDDLLSILSISKDAYYSLLSGGDGNAIKSASIIQRALKSSGADISMIMYCSKCKTDWDVWYRSARHVIQELDLLSISERVSAILYSTMNTQGVLGMNNLRIPIKNLLVELESESLKFDLTNDLILGGVFSALVRGKS

SEQ ID NO: 91847 - protein, 589 aa, Pseudomonas coronafaciens pv. zizaniae
MKLVSLKIFPNGQSGWGSDLLIFGRDITQLFGPNGCGKTPLVQSIPFCLGFPSVFRNDIYDKCKYAELVVSSAKGELRLRRVYGRDLDVEVVEPTGGVQKFFNERDYSQYIFDWLGIVTSNLVTTGNQLGAAYLATLLPIYYLDQDVGYSEIYCPPSKFIKDQFSEMMRMVFDLPVKNSFDVKKDRFRAKERLEFLDKDTQTFARMVDLARKNVSEITKSKSEMLAEMSQLEFELDSLQDVGASRDDSVNALDRIIYIHRNNIREISAEINQLQRRNLGIGKIVHEINTEIETLNLNEEARRVFLSFKEICGADLCQLFSSSSESYSKNLLYLRDQIKDLERNADLDEVRIGELNRQRDAQEQAIQSLVDARNSSSAKSEISALVEAITRLKTEIFTLQGQLSELEKVAALEGKHFKAIVERDKALTLYESFSVDRTYSPDLIKVRADIRRNFIEWLDVLHTNNVSRDITFKDDFSPLLGVETISQLKGSTKIRAVLAYHAAVFQAFAESGVLGFKFMILDTPKQHEIHNDDLGRYLMGLKKLCSDRGAQIVFSTTEYHYDGDDNDAEWLPTYDGEEQKMFLKVGGVIA

SEQ ID NO: 91848 - protein, 512 aa, Janthinobacterium agaricidamnosum NBRC 102515 = DSM 9628
MWFCRPNISGSFLDLTSDLATKCDNWRISKQQPSSKIIVLREIVPRSHKEASYLEVAFKAPCAAHQNTVHLYSINADSSISSKHTGSQRWRENFLFSRRYQHGLDYVAPAFHLTRIATREIKEQSMGTLHDKAPRETVGRETSNRFRMQFQAAAFAALEILSGKDVDRVYCDYHDDFVVRRNVDGSVQYHFFQVKTKGRANQQWKVDEVFSLKKTGKLDTEEKLVAIRDSIAGKLFVHTIEFGEECREVTVLSNVHFQEDVFKVQEHLKAGASDRSYITQFIEKFGEIFSPEIPLSDDQIKAARAKLTLVQVSYMGETLEQFADAARNAIWKHSEIDLHKHEVDEIANSLVALVEAKSCEPINGVTKDKIDVVAGVGIDDLLKVLSISTTVYRNLLSGDDPAAIKTASILQRELKSAGAPESMIEAASRAKVSWDVWLRTARHTYPEFDLELLLNEIDAKCRVWIVSSGALGQLREKIDEIVGSALGKKFPRLDVDLLLGAFCASIVRRASR

SEQ ID NO: 91849 - protein, 592 aa, Janthinobacterium agaricidamnosum NBRC 102515 = DSM 9628
MRLKSLKIEPLGQNGWESPLLEFGWRTTLIFAKNGSGKTPIIQSLAASLGFPPKFRDEIFSKCSTVTLEAENDGEPLIIRRILGANNRDFHAIMTYRGQESEHYNEGAFSAALFEALGLEPPRLVTTGGQVAQPYVSTVLPVFYLNQGDGYTAVYKSNSAFIADQFVEMVRFVFGLNPKHSFDVKKDLIGEKAALEAQTRKIVAAQRIFEYQSRGVDYAPANQDVLQRRVADITGQINTLRDSVDAKGTASSAVTELLRQKDQQIRSKQIELSELQNRVSGIDSIRTEIEGEVKTLGLNEQARRVFSSFGEICGATNCGLFMGSTESYGKNLLYLRDQIKDLDRNALRAEIRIEQIIEVLMNLQVERQVLVTQLNSPAAAGIDQLVTAVQGLTKQLVEAQGELGRMVALQGERFKIVKLEEERLRIQERIDSLSNSGRTDFDFNKLRYQLRELAVKWMDILDTHNVSRNVDIDLDLRFKFDGESLDLFSGSTKIRLVLAIHAALFEAYISEPSRPFRLIILDTPKQQELHTEDLAKYLRELENLCAAKNAQLILSSTEYDHPTGPQDKRWLPKYKGADHPMYLGTAGDFIGD

SEQ ID NO: 91850 - protein, 337 aa, Dehalobacter restrictus DSM 9455
MPHDLSGSMSKNRFRQELFWGISKMFDLLDRENFCIVFDYKCDIEIHLSNSIEFYQIKTHKVQSPYKFTALKKIDGKQSIIAKLYLLKDASSPDVPIKCALVSNAFFQIGKTPKADVETFCFTDLDDTSQKTIMKALQNELKRSNVDLNNLHYIYTSMNLLYPQNDLKGKIIGSFEKIKGCEPIKPNALYRLIVDTVEERACYELSAFNYDELVKRKGITKSELDNMLDRHMEKADDSVEQVRVLIDQRQLTIREKGKLKAALAKIVELEYSAKELQQSEKKISGYIKEIATDVTIEQMADILLQQFGSRFSIEYSQEEKYVFLLLIIKRWEGGKYA

SEQ ID NO: 91851 - protein, 565 aa, Dehalobacter restrictus DSM 9455
MRKLVFKELFLFSSIEKKARKIEFSLGKTMITSSSTDGTDRGKSVIMKSLYHAMGADCFFEDKWDDASKTYILSFAIGDDGYYIFRHNKLFKVFDANKDLMFTSVSRHELAERLYELFHFAVKLPKRNNNEDDEPIERLEVTPPAYNYLLNFVDQDKQNGSQFASFQRLSEYPDFKENVLYYHFGAFDDNYYSLIQQQEKIETEGKRLSKEQDMMLMMLDRVYASINDVSYSMDIEHLRADVSRTKDKYNTIAHTLNDLRQKLVNFRNDRADLEYHLRALSLLDKENEKQIAALKEHICPLCKSNLDDTMDIRIKRYNTGDDIILLSSDIQYSIGEIDRKITVVEAEYSNWLIKLEEYEASISIKSTEINDVMRHKGYIDIKEKISDDLHAVQGSIATNEADAKVVKKKLRKYSDAKKKINERYYTLMLSDKNWFGLEGIDSKSFENIKRTFSAGGSNNPISTIIWYVNLIQLKHEFNPDAINFPVVFDSPNNAETDDEKRNQIYKYICERISSNQLIVSGIGFTEEASNVHFDKVITLANEKYELLCEEDYIENVDLLRELNNR

SEQ ID NO: 91852 - protein, 370 aa, Xanthomonas arboricola pv. celebensis
MDTTGGSSDSNPLAAAQRERAGAQTFEKYEYQYHWALCRILGAHEESDDYVVFIELHEDVVLATSTDESVARFEFNQVKNVGTGPWNQNKLTSIPKGSSKKSNSSILGKMLQGVRQKPFADKLKSLDLVATCGFKLPPKTGGLKLSVISIGNLHEDCLKDIQAAIDEELGVYPIPKTLRFITPDLATSGFQDVTIGRISKLVDVKAPGTMCNASTIYRVLIDDLHRKGMVAFDFTEWSALIKNKGTTHGDVERVISSYTEKKGFKIFEKDLEDILNDLELKLNKKIQMRRAFERYHNAIRFERSLVVIDNQKNIRAAVESNFEEFEGQGVKKFLELALGALPEQPKTDIADFESIQAAIIYELLSKIHEK

SEQ ID NO: 91853 - protein, 583 aa, Xanthomonas arboricola pv. celebensis
MKKLAFKRLVVASDSLRSGNQFEFKPRFNLITANDNSFGKSTLAKLLFWTLGGDPAFDATWTGFDVRCLVDFTVGDEIYQAGRYGGIMFLRRPNGEWEKYHKITGAYSEAFAEIVGFEALLPTRSDSTKLETPPPAFYFLPFYVDQQRSWSQAWNGFTNLEQYAKWQKTIIEYHTGYLLPEFFAFEEQIAAKNLEKKLAEGEVRRIETAIEVVNTYVPQSSKTVALSRAEFDVLASEVSDDVAELQAKQEDLLGTISEIQTERIYLQGQLDLAKLASAELDKDYAFSVECVQGESLLCPLCGTMHDNSSPNRASILADKDEADSQVVQLDGRLKRLNKKLSDSREKLEGTRFEIEKINNKYKSLEPANAADGQIGPVEASFLDSIASRAVQKHVQRTMEGKSALIRTIKSANRALRAEQKTLLTKEEREDLNAAFKSSLAAHVQELNAQGVNLAPIESPVDYKKLYGSGGAAESTRGILAYYMSVIRQAHEAENEVFPAVVIDTPNQQEQADFNYENILKFLMEQVPSNSQLILCAMNRDEIHGYKSVAHVIELDEKKILKDTNYAECRALLHFDETIAKAQL

SEQ ID NO: 91854 - protein, 370 aa, Xanthomonas vesicatoria
MSSNVIADFMSAAPLAEEGGSISADRFDYQKNWALARLLTLHQGSGNYVLLCELHEGIAVLDCPDQPSRASFYQIKTSEKNAWTLKKLTNRKKGSSGNVLPSILGRLCAKAAQLKEQQVTFQFVTNVGSGYSFPVTAKASESSGERLFEVLKPADWEAMRKSLADELGEDLDKSLQDQLTISIAQIHLDTHNETAVGLVTNFLDQHVNGAHIRPAAFYRTLFDELRRRTVARRPSGTMSDVCKAKGIDRSAFDAMLNSAQSVAPAAGAWAHVLAELHRDNVSFSVRSQLKDAYPDYFSRMQSPLDAAFRKDRQILVAASESAMTNSSTLLEMASAAAVLARTEAGYGAAGLSPEQELIVVMMAFYETHPQ

SEQ ID NO: 91855 - protein, 565 aa, Xanthomonas vesicatoria
MKNLVFQKLHLVSHRERKARSVEFHPDVTVIKGLNDVGKSSLAKSIYGTLGAEAAEVHPDWKGASVISALEFTVDDCAYVMLKEGKTFTLIKSDQVLGCYTSVTEGLSPVLYELLGAKLRLKNRAEKVVVPPPAYLFIPFYVDQDAGWGHPWTSFARLEQFARWREDVVNFHVGVTGAEYFEALEVQAAATAARVEPAKQLDGLRSLQKRANDAVVEDIDMEIDPDVFSEEIERVVGLLQQLVEVREEERTKLSGLTQRRLQLQAQKDILDRVRRELHADYMFAVKHEGDDLECPTCGQLHENSFGQRFALAQDEARTDDVLVEVMDSLALVSGQIAISRQRLKDATEDEQRFNELLTRRRGQVTFARLLERAGQKRFSSQLDDQAADFVQEIANLDYRIKQAVERLRSARSTERKKEILESYAGLLTGFAKKLSVTFQDEFLQSLMLKIHETGSDRPRAILAYVYAILHLIWDAEDAVRCPIVLDSPKQQDQDDINHLNLLHFIRDDRPSGSQLILLLVDDAEVDFGCAPLVLDAKYSLLSSEEYEQTSEVIRGFQAMREMSAR

SEQ ID NO: 91856 - protein, 370 aa, Xanthomonas vesicatoria
MSSNVIADFMSAAPLAEEGGSISADRFDYQKNWALARLLTLHQGSGNYVLLCELHEDIAVLDCPDQPSRASFYQIKTSEKNAWTLKKLTNRKKGSSGNVLPSILGRLCAKAAQLKEQQVTFQFVTNVGSGYSFPVTAKASESSGERLFEVLKPADWEAMRKSLADELGEDLDKSLQDQLTISIAQIHLDTHNETAVGLVTNFLDQHVNGAHIRPAAFYRTLFDELRRRTVARRPSGTMSDVCKAKGIDRSAFDAMLNSAQSVAPAAGAWAHVLAELHRDNVSFSVRSQLKDAYPDYFSRMQSPLDAAFRKDRQILVAASESAMTNSSTLLEMASAAAVLARTEAGYGAAGLSPEQELIVVMMAFYETHPQ

SEQ ID NO: 91857 - protein, 565 aa, Xanthomonas vesicatoria; identical to SEQ ID NO: 91855

SEQ ID NO: 91858 - protein, 388 aa, Burkholderia thailandensis
MDVIHDIKPRETVGRNTVARFRMQFQAAAYAALEILSGKEIDRVYCDYHDDFVVRRTVAGVVDYHFFQVKTKGKANQQWDVAEVFSLKKTGALDTEEKLEAIRNSIAGKLFVHTVEFGDQCREITVLSNVHFNDDVHDVVTDLSAGTSSKKYIRQLIEKFAEIVSPETPLSSEQIDAARKKLSLLPNVQYIGDTLEAFSIAAHNAIWRHSEIELHQHEVERLARSLVTLVEEKSCSPISGLSKADIDLATGVGLEDLLDVLSISTQVYQTLQQGGDPAAIKVASILQRKLKEAGATESMIEAASRAKVAWDVWVRTARHTFPDLTFNVLLDEVDKKCKAWLLGGGVLGDLENFVQATLDSPIAKNFAALDTDLVFGAFCAAVVRRATR

SEQ ID NO: 91859 - protein, 587 aa, Burkholderia thailandensis
MGWQSPLLEFGYRTTMLFARNGSGKTPVVRALASALGFPNNFRTDILEKCNAVVLRAESEGKPLTIRRTIDATNEGFYATIDFDGEQTEHYSQGSFSLALFRLLGLKPPRLVSTKGEEAQPYIATLLPLFYLIQGYGYSAAYRAPSTFIADQFAEMVRFAFGLNPKHSYEVKKTLIEERSALEAQTRKIVAAQRVLEYQSRGVDDSDANQAVLQRTAENLTQQIDGLRASVDARGTANSTLTELLRQKDIQIRARQLELFELQNRVAGIETIRAEIDGEVKTLGLNEEARRVFTSFQEICRTPNCGLFLGSTESYGKNLLYLKDQIKDLERNSQRAEIRVEQLEERLKELGAERQTLVDNLEAPNTSDVDQLVTAVQALTKQLVGVQGELGRISGLKEERSKLFKLERERDRIQDRIDGLSNTGRADNEFNKLRLTLRELTVKWMQTLDTQNVSTNVDIDLNLRFTFGGETLDVIGSGGSSSTTIRLVLAIHAALLEAYLSDKTRPFRFIILDTPKQEELHTADLARYLTELEKMCEANDAQLIFSSTEYEHPTGPKDKRWLPSYRGPDKPMYLGKPSERLADDELA

SEQ ID NO: 91860 - protein, 376 aa, Burkholderia vietnamiensis; identical to SEQ ID NO: 91784

SEQ ID NO: 91861 - protein, 217 aa, Burkholderia vietnamiensis
MSNILAVKRGRRTFEDVVKSHGAEAAEAALDAEIASIQKAATATAETIRGLKIELDHLMKNHDAGEPLRIFRETFKELLVVADVPEFSNLGTWKLNKRPTDSGSPGPRSVVAYYGALWTVMKSTESFLPSPIVIDSPNQNAQDRKHLERVMGLLASKTPANAQVILCAEDPSDSFNPDKVIQLERERALLESDQMDEVSARVLPLIERAITELSRAG

SEQ ID NO: 91862 - protein, 369 aa, Pluralibacter gergoviae
MAKNKAANAGVDALTGFEFQRNCALYLLLDNFNSFINKEFFICIEHHDDFLFCYKTDCLSYINEIHAYQAKKLSGKIWTIDSRFSEMVSKILLVGENLRNDAFEKSEDYKHQLTFISNTEIELKYSPSKALKKEGITEQILRINEQNSICAYDELHKNIQNKIEEKVTDICNEESSVFHRKELSNLKIQWVDFPRTAAKQKESLIGLMSRKFSHIADSKAAIEVILALFRNVETVYNQGQEICLLDPTKRVEGEEVKKVMNIIDSQQKAFDYWRDEAQQFSMKFRIPLSIQKNHENYILNSFELLKDMSNYDYQIIKDFVRNNDYTTQYFSLQDALTAYVDNVRKSHSINLDNIDTFFAVLCSYVECYD

SEQ ID NO: 91863 - protein, 587 aa, Pluralibacter gergoviae
MKTIIKFDRLFVVSESHNLYFDQKFSNKINIISGCNTSGKSTLIQSILFTFGINDVKDGLSEIIRYNPTFRLDFSITKGGVDKKYIIVRELGSIYLKEDGGNVFSFHGIDSDGRVEHVKLKEMLSQLFDFNMLLEQKGELKKASIECMFLPYYISQSVGWVYLRESFSNLGFYKDFKDTYLDYYLGIENSFDKEYFYKLTKERAQLQSKISSLNKYSAEPHFVVSKLLDEEFGDEAQKYIDGYIKLVASLDEERDVYTGLCNKLSLTKNHVKILRRTKRNIKNQNYNNIDRCPACTQILPYSLEGLYGYYQNINDTDKLSEQINNKIQKIQSDINSSLAKIKKLEIDISSKYSYFIEKKSQNLSVNTWIDNKANIRLLGNIHEEIEEYTKRSDEIKGLIDGMGEEQSLFVERFNKEKDFKEIFKKYLNDMQLFNVTEPRYTDLYKINSFPFQGVELHKTVMSYHFALNSLIRKTDNIHRLPFMLDAILKEDIDDRNFDLILSFVGKNLPTDTQSFISMSEYAEDNLLKDGKEISAFRRAKVKDIKNRYFPDGTNLFFIGDGKHERTFLSKPLDLNLDIFVDTCRLTE

SEQ ID NO: 91864 - protein, 339 aa, Mesorhizobium plurifarium
MAFDYQVNVSMALVLDLFRQGKEFVALFDHHDDLVVFVGEGENSELSFYQVKSSSELTWTAKRLARRSPKGELPKSIVGKAYYNVAQFGPEIRRASILSNRPLSATLATATKSDLHDGELSVADLCSADQEALMKSLEADFPAGFNKTHATLLTFERVPFDLESYRATVLGRIVTMLEELHPDFVAVSSPFYTALLAAAGECTGNKTKSATVEELRKRVALDREAISRLIVRVRSRSKNLVEWWPSVNDELAADGTGALQIQRIKNMCMAYVNDRRAGGRTAAKLSAAIRDAIGKTAVSGMDSVLEAAVALKAHGLFEPAPELYDLQSAMIVELMETMT

SEQ ID NO: 91865 - protein, 564 aa, Mesorhizobium plurifarium
MPTVRFKNLFLLSQVEERALHVPLHSQKLLIQGANGFGKSVIMKSLYEALGATPNKIDDRWKNANVSSCLEFEFAGATWFSVKAHGVLSLFDDKGNRRFWGQRLVKDWGPKLAEFFGFKLEMVDKDGETLTPPPAYLFAPFYIDQDGSWDNTWVSFRKDFYLPESAATLADYHSGIRPDGYYAAKAELTKEKIVLSSLETAVETLRQAMTQIEEIEGTTPTYDLQEFSSECDDLVAESERLLVLQAEHRRMVSDLHEETHLVRAEAVLLKNALNEMRGEFELASSLPRQVECPTCGHEYQNSLAERFALIEDEGVLSKALTEVQSKLERLVEKERAERGNLDTIGASLARVQNILETQKQSLSLNDVLVAAGKTEAAKLLRVSLNEKIVAADDSRNRSESLRASMNEFTDRTRNSEIRKFYRTRLSMYSQELDVHLDEPEKQSIVSINVARGSEGPRALLAYYYAFLHTKIEFTTSVRFPVVIDSPNQQGQDKIHLPQMVKFIFDHVPDDAQTIVATEDASGLEFEGVAIVTYGEAKRQILREKEFDRVKTIFDPFFQKILAME

SEQ ID NO: 91866 - protein, 357 aa, Vibrio halioticoli NBRC 102217
MTDNPLAEAQRESAGASTSGKYGFQVHWALCAIIDKHKQKKEYAVFVEHHEDVVIANSLEADAAQFEFYQVKNVGKPYTSGALTKRAKGANSTLKSSVLGKLLSSCIDTQYEDRITTIGLVSSSGFSLGIDKDLKLDVIKTGDIERAELGHLTQAIHKELNILLIPEHLHFIVPEIQLKNQEDYVVSRFAYLVNSLFPGAYSNPVDIYRAVIDEMGRLSRLEYDYKDWERLIENKSLTSTNVQEVITVHSSYSGIDDLKNEFNDLVGELNLGSRQQRTLKRDFAKLALSRAGFMSALDIEVTESFRTSYGKVDASQFSDDASHVNALVQQAQNDGLLTKIPDQDKLILEVIYCLLKA

SEQ ID NO: 91867 - protein, 574 aa, Vibrio halioticoli NBRC 102217
MKGLQFQRLVLLSDSKKLANQFTFPKRLNLVTGNDNSIGKSTLVKNLFWALGCDPHFDKDWKSNDVKAILYFKIDQREYIVSRYADGIYFGRKDEALKKYAKITGQFAQDFAEEVGFDLMLANRKDGLDCPPPAFYFLPFYIDQKKSWDQPWGGFEGLGQYSNFKSTLIKYFCGYLSNEHFVLEEDKFEQKTIELEASQQVNRITEAISVLDEVAPEQTIAVSQAELEFIQREIEEELTSFSARQSELFEKQSALVNEIHDLEQQHLIASTSARELDEDYTFAVENVPSDSLECPLCGVEHDNSLLSRAGLLADKEALEQQTNSIGANLQEKYQQRKELAEEFSFVASEIERINEKYLNEDAPENKCEKQQAFEQVLHAVSQKNVNNNIIPKMENYQRQSQQAKEKQNDIKKEQSLLLNKKQKDELDELFMGNLVESINAVSATGVNLDGVKAPMDYKKILGGGAAEGTRGILAYQLAVLRQIDNANHCQLAPFVIDTPNQQEQAKHRYEQIMGVVSDNIPIGYQVILCAMDNEALSSYKQDAHIIELSDNRLLHSDPYIELRAEYERVVLSNR

SEQ ID NO: 91868 - protein, 347 aa, Mannheimia haemolytica USDA-ARS-USMARC-184
MLEKLKEIKQRETSGSDTFQNYDYQYHWAIYTLLENSRENEDIAILIEFHEDVILVENISSDNRFHFFQIKANDKHLTLNDITKRESGKKSILDKLTLGNEFLELLPNIKSIKLVSANGFNFCSGEANFHQLKGEDKKKIEEKLLLEIDRNLFLNRLYFAESKLPKVSFDQTVKGMLSDIIQGLYPDRKTNVNAIYLVLKDDLHDKGKTKLLSVENILQEKGMSFATVKSVIKHYTDIKDDNLISAQELLDDSLYGGIEKQKIKKELSKYSTHHVDAGSIQAQIRLDILNTNILNKLENFDGHSFTTIVDEFCVNLASKYGTITTITVQMIKAGVFYELSRYIRESA

SEQ ID NO: 91869 - protein, 536 aa, Mannheimia haemolytica USDA-ARS-USMARC-184
MKRLIIKQLTILSKDKNEGNQFIFRDGVNFIISNKNSAGKTTLLNLIYSALGCVVKFKDEWVDSFIRLDISVESEFYSLYKTPNGVYYMQNRNTLTKYIKDSDYHKDLAKILGYKIYLKDRSGIPTITRPAHFFLASYISQLKGWTSFFPNSFENLGEFQKFQADLVEQFCKVKSDKELENEEELKELKNNLDKKKNEKEVLSSTKESLESRVGVNLDELKKMAEDYEQDLNALQEELSTLVVERQFLLNEIAFSTSTAQELEADYQVARQNPSSIECPYCGTIHSNTITEKSELFFLKTKLEDSLSNQENQIKGITAKIHEIEGKISEITEFRHDSLSIIADNTRQFVKAMAIHGLSDVLGDIKKDITNLEERQKVIKSIKRRNKKEYQEYKESVNTFFVFKLKQYADKLSITFNSYDDIKKVTDYNKVLSAAKGGAADSNRVILAYYLAIYATAMNFNTDILPPLVLDTPNQNEQDKENYQSIINTLIQEENKQILICLIKSEYSETLNNVNRVWVDRIMKVGDYQDSFSPILN

SEQ ID NO: 91870 - protein, 370 aa, Chitinophaga pinensis DSM 2588
MTIPISSLKDKIPILIPRENSGSNSSSRFDYQKDWSLCRLIELHQCSQDYLLIFDWHEDLVLMDSGENPRKVEFYQIKGKKSGNWTINSLIKSQKDELGNPLLSIFGKLYDCRNKFCDETASLNFVSNAVFSVSLPDKKQNVQLESVCLLDLNEVEQKKITDKLKEEHPTFNKGEFVSITNLKTVSLSLDDSATHAKGVITNLLELLYPNENFNISSIYRSIFDEIRRKANYSKSITSFSELVAKKAIGRSEFSNMLNAVTFLDKSAKTWERVMNDLDSCSVPFIEKKKINDGYKKLKLEQLDPTNNFLSNLWKAIEFVRQDETFGFQLQDLNFHQCIIAIYNEVHRNNNIPPAYDKHFVLAMISIKLYE

SEQ ID NO: 91871 - protein, 572 aa, Chitinophaga pinensis DSM 2588
MKKFILSELLLLSQKDRKAKRVIFDPRRTLILGSNGTGKSSLIKSVYRCFGASPATDHPAWKDVDPILLAKFSIDDKKYSILKDAKFYAIFGERDELLGAYSSITKGLGPFLAELFDFNIKLPNQVGSLINLPPAFLFLPYYIDQDSGWQKSWSSFSSLTLIKGYREPIVNYHTGIKPNEYYETKNKVDECKMAIKSLEAEKIVLNTLLLQIKEKIADTDFNVDMQTFAEELNELLFEYEQLKIEEGTYKNKLLDLYNQKIALDQQAKIAKSALKETVKDYAYAREELIDELVECPTCGAHYENSFHERFQIANDEDNIRDLLTEIEKELSSVEEKIAAQNDNLSINTKTSERIELLLNKSKESILLRDVIGSAGRNEVKSVFELNNRNLVATIYDRLSEQTKLEGQLKSIIDKNRKKEIIDFYQLQMRKNLQELDVSTLKPDDYKRIDAAIPETGSALPRALTAYYFSIFEVIRKYSTSTFCPIVIDSPNQQAQDTGHIDKVLNFINRNQPEDSQLILGMEELYGVDFDCKIVELRDKGSLLQKDEFDEVKSIIRPFIDLLSPIKNRGRLF

SEQ ID NO: 91872 - protein, 382 aa, Acidovorax citrulli
MLETLKAHATGEDYAVVLEWQEDIAVLNSSKQPTRVTFIQLKKNESTHHWTLTGLLAPPPAPPAKVVQTTIDETDAPVAPKRRIAGRSRKPGQSTLAKLYFHRQRFSALTPPPELVFASNAPFYVGVGDDDQDETVTAVELCDLPAASVAKVQEAFRKQLELPENEAIALDGFRLAVTNCPTEEAHKFAIGELVELCQLKKIEPQVNAPFIAICLVASYVQQRAGKRAYAKDFAGLLERAVTRADVTLYFAAANDTHVRTQDLVAQVIARLNAEAADYEIVQEMEAAVNTACAEVTNRASVVWFTARALVDLYVKNNQYKANGNLKARLPAWLADLRAKKVRDSHLYSDGFLYCLMAMTLKNAQPLRHLSTAATGSQPEAAS

SEQ ID NO: 91873 - protein, 598 aa, Acidovorax citrulli
MSPIVVFNELWLLSERDASARQLKFHPRRNLLAGSNGTGKSRVLKHLVWALGCDPARRAAGEFDSNVVAALELSVGTSGNFTFLRQGRKRAAFDELGLLVFATESSSKWGEFFSETFGFKLLLQRKEEGEFGLAGPDYAMLPFYIDQYSGWGPKWATFPYLGQFVKWQTPLFSSFTGLKTAAYLEAQVHRDRSAAQIKTAKVHLKLQETSYKRVVEMLPAETTTIDESQFARELREVSELTKKLRDEQDEVRADLFKLAQMRQQLTAELNVALASERELVEDQAFLADYADDEPLVCPTCSHVHTATFHARQALATDAHDIHEVVIRLQTARDKLQGDEAALQIKLNAVAERLRSLNESLKIQRDGRPVADVVVAKSLSVLKDAYDVTRRDLAAELDIATEELQDYDSRLKDLADKDKEKLIRASFKEDLISYADMLDIAKVEIASKVKIGTRSPNASGSYAPRAVLANHLALLSVHSKHGDGPTFPFIVDTPQQSGQDPVSLGRMLDTILKRAHLGQTMVATESIPDNWVPPEDCSILEFGVKRHVLLEEAFRPGVEALSGMVKAMHDELLKQAPVGDEQPQDGDIPVPDAEDDEDE

SEQ ID NO: 91874 - protein, 419 aa, Acidovorax temperans
MPEPPLQKVLTDLFHDFEGDEIGGRHAIKGFSFQVWLAVLEALRAHRKPDDYAVVLEWQQDIALLNSSTAPTTVRFVQLKKNESTLKWTLPSLLVVGNAEDDDAAVDTQDDAVVTPATGKGKTSKKPKKPKPSILAKLYVHRRRFAGLTKAGLVFASDAPFEVPKAAGGTSMVSGIPLNTLPVPARNNIEKKIRAQLDVPAGETIDLDDFELLVTDCPVVDPHKFVAGECAEMQLATGLELSGKATLLAVLVIASYVNLRAASTRHAKNFNELLQRAVTRAEVTGYLAAANDQAVPTSDHVQSVIDRLNAEIAPPAVVRQMRREMARACVQISDRTTATPMIASRLKDVYTTKGEYPGVARLTDMFETWYRDLEKRSPPDFGLFRREYLYCLMAMIYEDANPTKHLPPVPADPQPENAK

SEQ ID NO: 91875 - protein, 611 aa, Acidovorax temperans
MRATVTFHALWLVSEKDASARRETFSPSKNLFAGLNETGKSRVLKHLVWTLGCEPAARNAGSWDSNITAATELSVGNKKYTLLRSGRHQRAAFDADGKLILGTESGKVWTEFFAELFDFPLKLQRQQEGMFGLAGPEYAVLPFYIDQEGGWSRKWATFSGLGQFFRWEPVVFEAFTGLRPQRYFLAQLRRDEVDYKLREAKLQARLQSRAFDQVSAMLPESKATLDEQVFANELRELADRVGVLSKEEDEVRSALVEAAEDRQTKFAELQMVMRAEEDLVGDLAYLSKIPDDGHLTCPTCGQVHDSSFRAKVELATDAEDAHQLVISVRNQLESVRKREQDLRNKLQAVTSSLHELRLSMTRQKEGTTVSDIIAAKSRTTLEQAYDRTKRDLSAQIDEFKEERDALQSELAGLTEKEREKQVRNEYKGELDAYADYLGIAKAEIGTVKIGTRPGAKASGSSGPRIYLAMHMALLALNRRYGEGPAFPFMVDTPRQQGLDDANTAKLLDTIYKHAPSHQVFVANESVPLGWTPPEGCKVIPFEHKRQVLRPEEYKDGVAALEPMVSQMLVAIEAERVVNAQAEQAEGNEEQFDVVPDESDGVDASDDSEDNV

SEQ ID NO: 91876 - protein, 342 aa, Atopobium vaginae DSM 15829
MDREKYYMNLPKDLSGSIAKNRFRLELLWGISKIIDEHKANNEYTIIFDFKCDIELHKDDELDFYQIKTKKSGNYNSNNLCKKDKNENNSILGKLYALYSPNYNIKLAIVCNKQLKIKNKEIDFPEQCFADLDQDVLDDVREKLCAELKLNTVCLDNVFYIFDNMDLLNPEDSIRGKLVKSFVDIKGEEPQNPNALYRLVVDSVKEKASYEFDLGTYADVVKNKGITRSEFDKMLNAHKKESKNGINETQEYINNLPFAKRRRYNTALGNILEIQQSESLRVIKIKIYDFIAKHEDSLDDIENYLKEISKLFNDDFDVEFTNDMKSVQYIMIYYMYASGGIL

SEQ ID NO: 91877 - protein, 560 aa, Atopobium vaginae DSM 15829
MNVIFDKIYIFDVVKKEAYSTDFKKGVNIITSSGIDGTDRGKSVLLRSLYHALGADSHFDSKWGEKDKVYILFFKVDNKGFSIYRSQKLFKIFNLKGNLIFTTIHRSELAYFFDNLFNFSIWLPQKNTNQLVIAPPAYSFLLNFLDQDEYIGTKFNSFKSLAQFSNFKLNVIYSHLGIYNKEYFELVKSKDKLELEIKSKKEEIEELIKMKDRTNSILDGFSCPETSSSLENELNIETKKYSSLINEMNSVRNKLVDLRNQLVEQNITLSQIAKFETREEKEIKTILKSKVCPECHSVLDSTLELRSKRYNHIDNALSLKDAIKTENAHIEDEILKNEGVYSNLALVLEEHDKKICKNKREIKDYIKFRGLNKLIDEINNDLAINHRIIDSTKEDLKPLKKEFKSVNDKIKSVDENYYYLIDKLKIRFNLNELESDSYERLSKNFCASGSNKPLSTVIWYLTLNDLKQKFNPDGTTFPMVFDSPNNAETDQEKKQALVEYIMESSDQFSQLIVSAIGFSEKDYSINSNINIKVLENEKYSLLNSEMYVQNYELLQCMNDA

SEQ ID NO: 91878 - protein, 365 aa, Leclercia adecarboxylata
MDSETEMDNPLASPQRESAGADSYDRFEYQYHWALCQAFSAYCTNKDFAVFMEYHEDVIIADSLDKTKVKFTFNQVKANASGSYTTNNLTKRVNGKNGAKPSLLGKLCSSVHNKKYLKNVIELNFVSTIGFNFSPKDGLKLRTMGLSDLEDIDSNSITAALNSEVSGFKSFPKEILRFVYSDIPLQSYYEHTITRITDSVEVVFPNHLLKPKDIYRVLMDSLRIRGKDTFDYDKWDEVISNKALTYNDIHNVVTKGISGESSGVDLDAAKYIISDLEISALEKGKLLKAINLYSLRVLSPSLAMLDAQKSIREVISNNRSLLGAEITHQMLQNLKSQLEGNVTSLFDSDRESMAAIVYEIISSDI

SEQ ID NO: 91879 - protein, 555 aa, Leclercia adecarboxylata
MRKLILEKITIISHSTKSARQFEFGRNLTLITADDGNSVGKSTLAKMLFWSFGCDPLFSPVWKALDCSSIITFSIDEESYSIHRYKNEMSFRKDGELLKVYDKITGAFSEKFAELVGFDVLLPKKNSFTLEVPPPAYYFLPFYIDQKRTWVKPWDSFTNLQQYSKWAQPVISFHSALISKEHFVVEGDIYDIKEQVNEVQNNISELNNAVTILKSNIKEQDFNVDSESLASELIKCEESIKLNLEETSIVKIDIIEVEVQVNLAKSIIVELDKDYIFSVENMNEGSIECPTCGTIHENSIANRSSILIDKELAQKQLGVLLEEKSQLQKTLMILRDEISGFKSQLAKLQAAFETSNSRAFTEFATNNVDKQVEVIVEKKTSDLVSKQLKEKGLRKSQKDLVSKEQLNLIKEDFANTFFKYITKLKVNIDASLIKSPLDYNKIYEVGGAAEDARAVLGYYLALYEHISSHSKEVISPLVIDTPNQQEQSTENYRKIVEAITRGVDDNNQYIICAMQHGALEKLSENAKIIRLDEGKILKTSEYLDAKLFEREFLFI

SEQ ID NO: 91880 - protein, 369 aa, Clostridium aceticum
MDRPNKTANAGVHGSTGFEFQKYCALYILFDKYKEIKNRKYFICLEHHDDFLFCYQSNDEFIESIDVYQAKKSSSEWNQGKELYEILKKMLDVGAALHNDNIPKWDNYYHNLEFTTNNSIKLNNGINRNGERITATINESNNRLKFIDLNEEIASKIETEVKKLLGKNLVGLEELDNVSMAYIDLPKKDKQQKDSLVGFFNSLFGKKVSDHRAAVDTLLLLFREVENTLNNGNIVKLMDKSKRVSSDMVNEALNIITTKNMALELWRAEKKQACEKLGIVISERKKFEEDFCNSIDRFKDKQQVEHQKIFSFVYKNKNYLDNFIEEIDCIQAFYEDFKNNVNSLLAPITIKAAIYAAYIEVRDELWEQN

SEQ ID NO: 91881 - protein, 574 aa, Clostridium aceticum
MGTKLIINKLVAYAESNNKYFHSEFDNGVNVIYGKNTSGKSTVFQLILYTFGINDNNDYLKEIIDEEVIIRVDCQLLKNNNTEQVIFIREDETLYIKRGKFPTIKFNGIKANNSAEHIKLKEYMHELFDFSLRLENKDGYNVAPIEAMFLPYYIPQSVGWVYLRKAFSGFEFYKNFKNDYLDYYLGIESFVDREKKQKLELQLKSKEDEMKFFINLEQNNEEFLVTKLVDEQFTELSKEYIGSHSENQQILIEKEEKFISKCNELSYYLERKSLLRMISKNHKKQNPISGKCPSCNQELPFSIGESYKYLQEQNDTKKEVEHCKHKIKSLQSEINSLRKEIDKRKNRKMKEYEILKKYKKYNVSFDNWLRDKVNIQLIDNIKHKLGELTSEKEKISNDLKAFKTEEDVESSRLVKSKEFAKIFQSYLDELGVKPLKEDRYKSLYQISAFPSQGVELHKTVLAYNFAFNKVIEKTDPIHRFPFMLDAIFKEDIDPANKNKIIEFIGTNKPDDTQVILSIAETKEYENNIYRFNNDYFNGEAKLICIGELIKERAFLSNYDGSIDDYLEETFEIIN

SEQ ID NO: 91882 - protein, 369 aa, Clostridium aceticum; identical to SEQ ID NO: 91880

SEQ ID NO: 91883 - protein, 574 aa, Clostridium aceticum; identical to SEQ ID NO: 91881

SEQ ID NO: 91884 - protein, 363 aa, Saccharophagus degradans 2-40
MDVNNLNQANPLGLEPKREKSGSDTFRKYNYQYHWAFCRILDEHEAGNEFALFIEEHEDVTIADSLDVSETAFELNQVKETSKRHTIHSLTSVSKGESKSLIEKLAESCCDKSYSQRISKVNFVSTGGYSFNIHKKGYSFEVIGSGELSNEEVKKVEDTISNISGAEGFIPKLAFVIPSLPERGFDLVVEGKISSLISKIAPGLKYDANSIYECVIRDLNRKGENSFDYKNWNDALKRKAITSGQLSEVIEQHIGRKPDENIVSEVIQILNDEYSLKSLARRNVVNGFNRYYTRKISSRDSIVKEVSSDIVRCIENNAKNHTNARDLEVDVKKELSEKTLGFFQTQEDITGAFLYELLEGVKI

SEQ ID NO: 91885 - protein, 571 aa, Saccharophagus degradans 2-40
MKEMYFNRLTILSKTAKKAAQFDFSKSYNLILSKQKNSVGKSSLVKNIFWCFGCEPQFDDSWKSLDCRVILDFEVKGKLYQIARHGNRFILKNHEGKYKVFSATGGDFSVEIMALLEFDALLAVRDKDEVVTPPPAYYFLPFYIDQKQSWANAWSSFNNLGQFPSWKKTVIPYHTGMIGKEYFDKTKEICSKKVEMAETNKEIDRFDTAISVVSEFSANSGIVIEEVELDEIEEEISVDIMDLHFQQEILFEELANLRAEKAHVESQIVIAKQSLEDVVADYEFAECLDEDIECPTCGVVHDNSIVNRFSLYQDRNQAEEIIRRFQSDLVHLEEAILAKDSAFKSVREKIDQLDEKYSSEQDGNRTLSSVLDAISSKSVRKKVEANRSIKIESLHQLDVDEKLLVKERTAASKETRKLVKDAFQEYFPRYLSKLKAFGVNTNSVKSPENHAKVAESGGAAESTRAMLAYYLSVYNLIHKFGNHVLSPLVIDTPNQHEQATKHYESIVSLLIDDLPEQSQLFVCGMDSQKLERLKAKAKTIYLDVEHSLLNSEDFEKIDFEYSGLFENEESV

SEQ ID NO: 91886 - protein, 369 aa, Burkholderia cenocepacia AU 1054
MRDPKPRLTKTAAASSGTPASNPLYVSQREKAGAATFDRFNFQYDWALYEFLEQHKLNQVSIVFVEFHEDVVFSSSLDAADARFVFCQVKAGASANFNKKSLVKRIKQKPSVLGKMFTSVGDKKIAARVDKVRLVATGGFKLELAEKGFQLEEIPWDALHQETANEISAALAAELGTDCALEKLHFHKPQLPELQHRRAVIGLIADLISERVPNGGGDCQAIYHVLQDELRRKGVHTWDYSDWESLVRNKGLTGQRVDALFEQFASSATVDDLLSDFEYATAQLQYEPRERRKLRQSARTYVLNTLDGGSLAHLQVRAAVSRHLQADFPLRLTTDLLTSLVAASPDVVREHLVDETSLVAAYIIEYLRA

SEQ ID NO: 91887 - protein, 567 aa, Burkholderia cenocepacia AU 1054
MSALIFKQLFVQSTSQKLAGRFRFEPGLNLITGDDNSIGKSTLVRLPLWTLGCDFDFDTLWAPFDARTILEFEVDGRTYLAARHRNQIRLKVGEEPWTVYHSTSDAYEQAFASIVQFGAVLPRRKEKWIHEVPPPACYFSAFYVDQRRGWTEPWGSFVIHKYEDWRRPVINFHVGYHSAAYFEVGAEIAKGLQHIDADQGLIEKYGRAVEVLTLLAPPEELPTTDAELDSAIADIQNSMVAVKRREQRALSVLRAKHEELEITKVQRGIAQAAVDDIEKDYDFASTQLRDDVLVCPLCGTLHDNTLLERASLLQDRAQAEQQVASLTATQSKIEAAIETTLRRLDAVREELAKLNRRFKRLDKDVTVKSILETMGTDSVRRRAEEVTTTARLRLRANKKTLAEQRAAQSELIEDGKEESINAYYQSELAGLCDTLRLSPAFDVRTALPTGYRELAVSGGGADSSRMQLAYHLTMHRLIRHFKTEVLAPLILDTPNQQDQGALNYGLVSEELKRRATKDTQLFVCATRHAAMQTLEKDSTVIELDENRLLSTELYERLQAGFVRVFGE

SEQ ID NO: 91888 - protein, 369 aa, Burkholderia cenocepacia HI2424; identical to SEQ ID NO: 91886

SEQ ID NO: 91889 - protein, 567 aa, Burkholderia cenocepacia HI2424; identical to SEQ ID NO: 91887

SEQ ID NO: 91890 - protein, 369 aa, Burkholderia cenocepacia; identical to SEQ ID NO: 91886

SEQ ID NO: 91891 - protein, 567 aa, Burkholderia cenocepacia; identical to SEQ ID NO: 91887

SEQ ID NO: 91892 - protein, 368 aa, Eubacterium plexicaudatum ASF492
MLDKQAKDKKTKFREIEVDTGSGSMSYNRFEMQVSQTLHMAIEIFDNLDYLFVLDYYDDITIFDKEQNPETVSYFQMKTNEESISINTAITKDWLVKMYAQLENTDWLVKELGLITNCPLVVSVTTKKDSGKNSTERKIFTSEKTSFMEFNSVTISKIKEDIAKKKGIDVNSVDLTKFFHMRTTLSIPSHREIVEQEMGDFLHSKYPRITMDSVKAIFGAMMDILTRRQQYELLNDAASFSEVRNKKGISKRDFERVIEEAMLISIPPFEEISKVLSFQEDDKYKASYEYTLILSDAQTKSETFTSLFTKVRTMVKENKRDTAKSFKQYSDELCKKLYSIHPDIELIYNKTYISILITSITISEMRRL

SEQ ID NO: 91893 - protein, 562 aa, Eubacterium plexicaudatum ASF492
MREMYFDNILIADIVEKTAHFHGFEKGFNVVTSQDNHVGKSSLLKSLYYTMGAEVDFDNVWNKNTKLYVVEFYIDEIKFRVARWQKAFALFRGTELILTTKSVSRDLAKEYEKIFSFSVYMANKKTNKIELAPPAFTFMPYYIDQDRGWSGLYESFSNIDQYKKPDRIKSLYYHLGIYTRSTVELMAQKDALKDKIEQLKAEEEKIRITIDSLYAEIQNLVPADSIEELERNLMIPKERIAFLVSRIGETRNKIQSLETALYQHEHQLEVIQEYRKIKDGVNILEDRENIRTCPKCGYSFDEEIYSIVRSNYNLQNEDYMYKQIEQIISSIASELEKYKENYVGLMDELKQQEQAYDEKQDSYEVYLRQRGLQDSVKHFTEQLGGNVYEQEKHGKEIKDIDKELRKLPNKKEVEENYIENVRLNIIKLDAWNSAYEGNIKLLKPIKAQGTLENKIILAQMIGLFQTMQYFHTNTILFPLVVDSPRAKEASHTSSKDILKLIFEMDNLPQVVLATMDYEDFEKEMKRRAKVTVLTEKRKLLNSDVYNKYQILIEDLKELLDSL

SEQ ID NO: 91894 - protein, 388 aa, Burkholderia ubonensis
MDVIHDKKPRETVGRNTVARFRMQFQAAAYAALEILSGKEIDRVYCDYHDDFVVRRTVAGVVDYHFFQVKTKGKANQQWDVAEVFSLKKTGALDTKEKLEAIRNSIAGKLFVHTVEFGDQCREITVLSNVHFNDDVHDVVTDLSAGTSSKKYIRQLIEKFAEIVSPETPLSSEQIDAARKKLSLLPNVQYIGDTLEAFSIAAHNAIWRHSEIELHQHEVERLARSLVTLVEEKSCSPISGLSKADIDLATGVGLEDLLDVLSISTQVYQTLQQGGDPAAIKVASILQRKLKEAGATESMIEAASRAKVAWDVWVRTARHTFPDLTFNVLLDEVDKKCKAWLLGGGVLGDLENFVQATLDSPIAKKFAALDTDLVFGAFCAAVVRRATR

SEQ ID NO: 91895 - protein, 600 aa, Burkholderia ubonensis
MRLKSLQIESLGDVGWESPLLEFGYRTTMLFARNGSGKTPVVRALASALGFPNNFRTDILEKCNAVVLRAESEGKPLTIRRTIDATNEGFYATIDFDGEQTEHYSQGSFSRALFRLLGLKPPRLVSTKGEEAQPYIATLLPLFYLIQGYGYSAAYRAPSTFIADQFAEMVRFAFGLNPKHSYEVKKTLIEERSALEAQTRKIVAAQRVLEYQSRGVDDSDANQAVLQRTAENLTQQIDGLRASVDARGTANSTLTELLRQKDIQIRARQLELFELQNRVAGIETIRAEIDGEVKTLGLNEEARRVFTSFQEICRTPNCGLFLGSTESYGKNLLYLKDQIKDLERNSQRAEIRVEQLEERLKELGAERQTLVDNLEGPNTSDVDQLVTAVQALTKQLVGVQGELGRISGLKEERSKLFKLERERDRIQDRIDGLSNTGRADNEFNKLRLTLRELTVKWMQTLDTQNVSTNVDIDLNLRFTFGGETLDVIGSGGSSSTTIRLVLAIHAALLEAYLSDKTRPFRFIILDTPKQEELHTADLARYLTELEKMCETNDAQLIFSSTEYDHPTGPKDKRWLPSYRGPDKPMYLGKPSELLADDELA

SEQ ID NO: 91896 - protein, 369 aa, Burkholderia ubonensis
MELCQVENDDGLHEFGGGHGNKGNDFARFWLISELIALTEVGTNDYLFILEYVQDVARIDDPAAPAAITLYQLKKKEGSVWDLNSLAGLTEKGKQVKPTSPLAKIVKSVLGFKMLSASAEFISNARFNVKLAAGGTALQMDYLSLADLQVERQSNFRDSAAAAHAVPAATIPLQKIGLRYAPIEVNDMRVHVIGLAHGFLKKLSIAHAAQADSFVDALFAKLATASRNTSKCQTWEELVSKRGYSKKQFNDALAALQLLPDQQGRRETLLKELASALEWHTRDQMRIEVALTELARLKVTGGELSIANVDWAALRAVSATAEAESWSTAKEFEAVESCLKGFLPDESVARIRALAIYGMVQAWTSQTFA

SEQ ID NO: 91897 - protein, 97 aa, Burkholderia ubonensis
MKSTESFLPSPIVIDSPNQNAQDRKHLERVMGLLASKTPANAQVVLCAEDPSDSFNPDKVIQLERERALLESDQMDEVSARVLPLIERAITELSRAG

SEQ ID NO: 91898 - protein, 369 aa, Burkholderia ubonensis
MELCQVENDDGLHEFGGGHGNKGNDFARFWLISELIALTEVGTNDYLFILEYVQDVARIDDPAAPAAITLYQLKKKEGSVWDLNSLAGLTEKGKQVKPTSPLAKIVKSVLGFKMLSASAEFISNARFNVKLAAGGTALQMDYLSLADLQVERQSNFRDSAAAAHAVPAATIPLQKIGLRYAPLEVNDMRVHVIGLAHGFLKKLSIAHAAQADSFVDALFAKLATASRNTSKCQTWEELVSKRGYSKKQFNDALAALQLLPDQQGRRETLLKELASALEWHTRDQMRIEVALTELARLKVTGGELSIANVDWAALRAVSATAEAESWSTAKEFEAVESCLKGFLPDESVARIRALAIYGMVQAWTSQTFA

SEQ ID NO: 91899 - protein, 97 aa, Burkholderia ubonensis; identical to SEQ ID NO: 91897

SEQ ID NO: 91900 - protein, 366 aa, Burkholderia ubonensis
MQFQAAAYAALEILSGKEIDRVYCDYHDDFVVRRTVAGVVDYHFFQVKTKGKANQQWDVAEVFSLKKTGALDTKEKLEAIRNSIAGKLFVHTVEFGDQCREITVLSNVHFNDDVHDVVTDLSAGTSSKKYIRQLIEKFAEIVSPETPLSSEQIDAARKKLSLLPNVQYIGDTLEAFSIAAHNAIWRHSEIELHQHEVERLARSLVTLVEEKSCSPISGLSKADIDLATGVGLEDLLDVLSISTQVYQTLQQGGDPAAIKVASILQRKLKEAGATESMIEAASRAKVAWDVWVRTARHTFPDLTFNVLLDEVDKKCKAWLLGGGVLGDLENFVQATLDSPIAKKFAALDTDLVFGAFCAAVVRRATR

SEQ ID NO: 91901 - protein, 600 aa, Burkholderia ubonensis; identical to SEQ ID NO: 91895

SEQ ID NO: 91902 - protein, 366 aa, Burkholderia ubonensis
MQFQAAAYAALEILSGKEIDRVYCDYHDDFVVRRTVAGVVDYHFFQVKTKGKANQQWDVAEVFSLKKTGALDTEEKLEAIRNSIAGKLFVHTVEFGDQCREITVLSNVHFNDDVHDVVTDLSAGTSSKKYIRQLIEKFAEIVSPETPLSCEQIDAARKKLSLLPNVQYIGDTLEAFSIAAHNAIWRHSEIELHQHEVERLARSLVTLVEEKSCSPISGLSKADIDLATGVGLEDLLDVLSISTQVYQTLQQGGDPAAIKVASILQRKLKEAGATESMIEAASRAKVAWDVWVRTARHTFPDLTFNVLLDEVDKKCKAWLLGGGVLGDLENFVQATLDSPIAKKFAALDADLVFGAFCAAVVRRATR

SEQ ID NO: 91903 - protein, 600 aa, Burkholderia ubonensis
MRLKSLQIESLGDVGWESPLLEFGYRTTMLFARNGSGKTPVVRALASALGFPNNFRADILEKCNAVVLRAESEGKPLTIRRTIDATNEGFYATIDFDGEQTEHYSQGSFSLALFRLLGLKPPRLVSTKGEEAQPYIATLLPLFYLIQGYGYSAAYRAPSTFIADQFAEMVRFAFGLNPKHSYEVKKTLIEERSALEAQTRKIVAAQRVLEYQSRGVDDSDANQAALQRTAENLTQQIDGLRASVDARGTANSTLTELLRQKDIQIRARQLELFELQNRVAGIETIRAEIDGEVKTLGLNEEARRVFTSFQEICRTPNCGLFLGSTESYGKNLLYLKDQIKDLERNSQRAEIRVEQLEERLKELGAERQTLVDNLEAPNTSDVDQLVTAVQALTKQLVGVQGELGRISGLKEERSKLFKLERERDRIQDRIDGLSNTGRADNEFNKLRLTLRELTVKWMQTLDTQNVSTNVDIDLNLRFTFGGETLDVIGSGGSSSTTIRLVLAIHAALLEAYLSDKSRPFRFLILDTPKQEELHTADLARYLTELEKMCEANDAQLIFSSTEYDHPTGPKDKRWLPCYRGPDKPMYLGKRSDLLADDELK

SEQ ID NO: 91904 - protein, 388 aa, Burkholderia ubonensis
MDVIHDKKPRETVGRTTVARFRMQFQAAAYAALEILSGKEIDRVYCDYHDDFVVRRTVAGVVDYHFFQVKTKGKANQQWDVAEVFSLKKTGALDTEEKLEAIRNSIAGKLFVHTVEFGDQCREITVLSNVHFNDDVHDVVTDLSAGTSSKKYIRQLIEKFAEIVSPETPLSCEQIDAARKKLSLLPNVQYIGDTLEAFSIAAHNAIWRHSEIELHQHEVERLARSLVTLVEEKSCSPISGLSKADIDLATGVGLEDLLDVLSISTQVYQTLQQGGDPAAIKVASILQRKLKEAGATESMIEAASRAKVTWDVWVRTARHTFPDLTFNVLLDEVDKKCKAWLLGGGVLGDLENFVQATLDSPIAKKFAALDADLVFGAFCAAVVRRATR

SEQ ID NO: 91905 - protein, 600 aa, Burkholderia ubonensis
MRLKSLQIESLGDVGWESPLLEFGYRTTMLFARNGSGKTPVVRALASALGFPNNFRADILEKCNAVVLRAESEGKPLTIRRTIDATNEGFYATIDFDGEQTEHYSQGSFSLALFRLLGLKPPRLVSTKGEEAQPYIATLLPLFYLIQGYGYSAAYRAPSTFIADQFAEMVRFAFGLNPKHSYEVKKTLIEERSALEAQTRKIVAAQRVLEYQSRGVDDSDANQAALQRTAENLTQQIDGLRASVDARGTANSTFTELLRQKDIQIRARQLELFELQNRVAGIETIRAEIDGEVKTLGLNEEARRVFTSFQEICRTPNCGLFLGSTESYGKNLLYLKDQIKDLERNSQRAEIRVEQLEERLKELGAERQTLVDNLEAPNTSDVDQLVTAVQALTKQLVGVQGELGRISGLKEERSKLFKLERERDRIQDRIDGLSNTGRADNEFNKLRLTLRELTVKWMQTLDTQNVSTNVDIDLNLRFTFGGETLDVIGSGGSSSTTIRLVLAIHAALLEAYLSDKSRPFRFLILDTPKQEELHTADLARYLTELEKMCEANDAQLIFSSTEYDHPTGPKDKRWLPCYRGPDKPMYLGKRSDPLADDELK

SEQ ID NO: 91906 - protein, 369 aa, Burkholderia ubonensis; identical to SEQ ID NO: 91896

SEQ ID NO: 91907 - protein, 97 aa, Burkholderia ubonensis; identical to SEQ ID NO: 91897

SEQ ID NO: 91908 - protein, 369 aa, Burkholderia ubonensis; identical to SEQ ID NO: 91898

SEQ ID NO: 91909 - protein, 97 aa, Burkholderia ubonensis; identical to SEQ ID NO: 91897

SEQ ID NO: 91910 - protein, 388 aa, Burkholderia ubonensis; identical to SEQ ID NO: 91904

SEQ ID NO: 91911 - protein, 600 aa, Burkholderia ubonensis; identical to SEQ ID NO: 91905

SEQ ID NO: 91912 - protein, 369 aa, Burkholderia ubonensis; identical to SEQ ID NO: 91898

SEQ ID NO: 91913 - protein, 97 aa, Burkholderia ubonensis; identical to SEQ ID NO: 91897

SEQ ID NO: 91914 - protein, 388 aa, Burkholderia ubonensis; identical to SEQ ID NO: 91904

SEQ ID NO: 91915 - protein, 600 aa, Burkholderia ubonensis; identical to SEQ ID NO: 91905

SEQ ID NO: 91916 - protein, 366 aa, Burkholderia ubonensis
MQFQAAAYAALEILSGKEIDRVYCDYHDDFVVRRTVAGVVDYHFFQVKTKGKANQQWDVAEVFSLKKTGALDTEEKLQAIRNSIAGKLFVHTVEFGDQCREITVLSNVHFNDDVHDVVTDLSAGTSSKKYIRQLIEKFAEIVSPETPLSCEQIDAARKKLSLLPNVQYIGDTLEAFSIAAHNAIWRHSEIELHQHEVERLARSLVTLVEEKSCSPISGLSKADIDLATGVGLEDLLDVLSISTQVYQTLQQGGDPAAIKVASILQRKLKEAGATESMIEAASRAKVAWDVWVRTARHTFPDLTFNVLLDEVDKKCKAWLLGGGVLGDLENFVQATLDSPIAKKFAALDADLVFGAFCAAVVRRATR

SEQ ID NO: 91917 - protein, 600 aa, Burkholderia ubonensis
MRLKSLQIESLGDVGWESPLLEFGYRTTMLFARNGSGKTPVVRALASALGFPNNFRTDILEKCNAVVLRAESEGKPLTIRRTIDATNEGFYATIDFDGEQTEHYSQGSFSLALFRLLGLKPPRLVSTKGEEAQPYIATLLPLFYLIQGYGYSAAYRAPSTFIADQFAEMVRFAFGLNPKHSYEVKKTLIEERSALEAQTRKIVAAQRVLEYQSRGVDDSDANQAALQRTAENLTQQIDGLRASVDARGTANSTLTELLRQKDIQIRARQLELFELQNRVAGIETIRAEIDGEVKTLGLNEEARRVFTSFQEICRTPNCGLFLGSTESYGKNLLYLKDQIKDLERNSQRAEIRVEQLEERLKELGAERQTLVDNLEAPNTSDVDQLVTAVQALTKQLVGVQGELGRISGLKEERSKLFKLERERDRIQDRIDGLSNTGRADNEFNKLRLTLRELTVKWMQTLDTQNVSTNVDIDLNLRFTFGGETLDVIGSGGSSSTTIRLVLAIHAALLEAYLSDKSRPFRFLILDTPKQEELHTADLARYLTELEKMCEANDAQLIFSSTEYDHPTGPKDKRWLPCYRGPDKPMYLGKRSDLLADDELK

SEQ ID NO: 91918 - protein, 388 aa, Burkholderia ubonensis
MDVIHDKKPRETVGRTTVARFRMQFQAAAYAALEILSGKEIDRVYCDYHDDFVVRRTVAGVVDYHFFQVKTKGKANQQWDVAEVFSLKKTGALDTEEKLQAIRNSIAGKLFVHTVEFGDQCREITVLSNVHFNDDVHDVVTDLSAGTSSKKYIRQLIEKFAEIVSPETPLSCEQIDAARKKLSLLPNVQYIGDTLEAFSIAAHNAIWRHSEIELHQHEVERLARSLVTLVEEKSCSPISGLSKADIDLATGVGLEDLLDVLSISTQVYQTLQQGGDPAAIKVASILQRKLKEAGATESMIEAASRAKVAWDVWVRTARHTFPDLTFNVLLDEVDKKCKAWLLGGGVLGDLENFVQATLDSPIAKKFAALDADLVFGAFCAAVVRRATR

SEQ ID NO: 91919 - protein, 600 aa, Burkholderia ubonensis; identical to SEQ ID NO: 91917

SEQ ID NO: 91920 - protein, 388 aa, Burkholderia ubonensis
MDVIHDKKPRETVGRTTVARFRMQFQAAAYAALEILSGKEIDRVYCDYHDDFVVRRTVAGVVDYHFFQVKTKGKANQQWDVAEVFSLKKTGALDTEEKLEAIRNSIAGKLFVHTVEFGDQCREITVLSNVHFNDDVHDVVTDLSAGTSSKKYIRQLIEKFAEIVSPETPLSCEQIDAARKKLSLLPNVQYIGDTLEAFSIAAHNAIWRHSEIELHQHEVERLARSLVTLVEEKSCSPISGLSKADIDLATGVGLEDLLDVLSISTQVYQTLQQGGDPAAIKVASILQRKLKEAGATESMIEAASRAKVAWDVWVRTARHTFPDLTFNVLLDEVDKKCKAWLLGGGVLGDLENFVQATLDSPIAKKFAALDTDLVFGAFCAAVVRRATR

SEQ ID NO: 91921 - protein, 183 aa, Burkholderia ubonensis
MRLKSLQIESLGDVGWESPLLEFGYRTTMLFARNGSGKTPVVRALASALGFPNNFRTDILEKCNAVVLRAESEGKPLTIRRTIDATNEGFYATIDFDGEQTEHYSQGSFSLALFRLLGLKPPRLVSTKGEEAQPYIATLLPLFYLIQGYGYSAAYRAPSTFIADQFAEMVRFAFGLNPKHSYE

SEQ ID NO: 91922 - protein, 388 aa, Burkholderia ubonensis; identical to SEQ ID NO: 91920

SEQ ID NO: 91923 - protein, 183 aa, Burkholderia ubonensis; identical to SEQ ID NO: 91921

SEQ ID NO: 91924 - protein, 388 aa, Burkholderia ubonensis; identical to SEQ ID NO: 91920

SEQ ID NO: 91925 - protein, 183 aa, Burkholderia ubonensis; identical to SEQ ID NO: 91921

SEQ ID NO: 91926 - protein, 388 aa, Burkholderia ubonensis; identical to SEQ ID NO: 91920

SEQ ID NO: 91927 - protein, 183 aa, Burkholderia ubonensis; identical to SEQ ID NO: 91921

SEQ ID NO: 91928 - protein, 388 aa, Burkholderia ubonensis
MDVIHDKKPRETVGRTTVARFRMQFQAAAYAALEILSGKEIDRVYCDYHDDFVVRRTVAGVVDYHFFQVKTKGKANQQWDVAEVFSLKKTGALDTEEKLEAIRNSIAGKLFVHTVEFGDQCREITVLSNVHFNDDVHDVVTDLSAGTSSKKYIRQLIEKFAEIVSPETPLSCEQIDAARKKLSLLPNVQYIGDTLEAFSIAAHNAIWRHSEIELHQHEVERLARSLVTLVEEKSCSPISGLSKADIDLATGVGLEDLLDVLSISTQVYQTLQQGGDPAAIKVASILQRKLKEAGATESMIEAASRAKVAWDVWVRTARHTFPDLTFNVLLDEVDKKCKAWLLGGGVLGDLENFVQATLDSPIAKKFAALDADLVFGAFCAAVVRRATR

SEQ ID NO: 91929 - protein, 600 aa, Burkholderia ubonensis; identical to SEQ ID NO: 91917

SEQ ID NO: 91930 - protein, 388 aa, Burkholderia ubonensis; identical to SEQ ID NO: 91928

SEQ ID NO: 91931 - protein, 600 aa, Burkholderia ubonensis; identical to SEQ ID NO: 91917

SEQ ID NO: 91932 - protein, 388 aa, Burkholderia ubonensis; identical to SEQ ID NO: 91918

SEQ ID NO: 91933 - protein, 600 aa, Burkholderia ubonensis; identical to SEQ ID NO: 91917

SEQ ID NO: 91934 - protein, 222 aa, Proteus penneri ATCC 35198
MEYQTSFKKAIKAQVKLDDSSIDLSVMRFVQSSLSLNDHITHLKGKLCDFLSKKFGDSISLNVNALASLLEQSCREKSKVKSADIINFSELISRKGFSSKALNSMLDSLNVSNSLKPDWDKASPLFNDLGKTSLQLIILQAMFSQVCIDLNQNTKNPSTVYLEYAISLYDEASVHSDLKIYVAETMQKIDALCPDYALTLKSGKKECIVVYSIIQKLFEGGE

SEQ ID NO: 91935 - protein, 550 aa, Proteus penneri ATCC 35198
MKSIYFKSAHILSLRDKKGFSFKFSPDINIITGDNDTGKSSFIKSLYYTLGADVRLDKKWKEDNFVSKVVICVSNRDYAFLRHEKRISIFDITEGQEHHLVTSSSRTEIALTVRDIFDFNLELVTKSSLVQGQAQPASLYLPYYIDQDNGWGKVLDSFSSLAMYKDWQNNILNFHTGVKPKEYYTLQGKINLIDIDLVEIRTTLKALQRAKKRFEESFGRVLFDVDVKYYEELLERFLRKCQDLHQEETEYRIKLIKVLSLRDELLEEIEESKRQLDENDIDSLLPSAGLEARYAVLENKEKLLQIIPKLYEEKSVYDDQITKIKEDLKNAKSLSSELKDMLKEVKEQLSLQDIIKSQASKQVEVTFDEQINELLLKIGELDVARTQFSKEIAKYEDKKRTKEINDKFKESLKFAQTELGIKDPKVGTILQYGPISKSETGSRAPRAILAYHYALLKTIEDKSTSPMLPVVIDSPKQQDPDPRTTKKLFDLCINGLSTNSQLIIGSVSFERETNQFKTLIMTEKYSLLKSELYKQVYQEIMPLYQRAALS

SEQ ID NO: 91936 - protein, 358 aa, Halomonas hydrothermalis
MVNSNSGVEGGSGYSFQRCCVVFLLFEGYEEINSNNYFICLEHHEDFLFAFLDDNGQLKKIDTYQAKKSRDDWRTDDDLCEIIGKITMVGKELVSDPIEKSNDYQHTLSFLTNRNILLTSKKEKGQKQDKIKVQVSNKRKKYSDLSEKIKRNIESRICQSILESAQLEHVYFQYIDFAQSHKNWQRELKGLAIEHFGQEVNDHEAVISTLMQLLEDVAQSYNDDNKVLLSDQSKRITKNKVSETFKMFTESRKSFDFWRKYSERISAQLDLKLPIRRRAKELLENCFDYFKDIQQVEYRKIYKFVEERTDVDELHVSEADCIVDLYHRYQQEFQPRLENHMVSFAIIAAYVETRGMYV

SEQ ID NO: 91937 - protein, 532 aa, Halomonas hydrothermalis
MGINDSKENLNDINNSGVFFRLDCDIKGHKEHCSLVFIRSDDTLVLKKGGEPPIRFDGINSNNSFEYGRYKNIFSKLIGFDLVLQKQSELISAPLEAALLPYYISQSVGWVYIRESIGDFRFYKDFKFDFLDYYCGIESSHERINKYNLEKEKKELGFELKQLNSYEDKNEELKVSKLLDERFKGEAEKYLESYQGLNKDLSGKEAEHTKLCNKLSMLRGRQKVLTQIIANIKNQKPKIDQCPTCNQSLPGDLKEFYLYSQDVNDALKEKDNVREQIKKTAAKLNSVENTISELRIKIGDDYSVLRHLKVSDITFDSWLNHNANLRMLKNISIKNDLLQKRIEVINGEIDRVGNGVDIDSLRQAKEREFFSIFKRKVLALGAQLPKESKYHNLYSINSFPCQGVELHKLLMAYNFSFYEMVYKNPDIHKFPFLLDAIFKEDIDAESRSNIFNFLSQESKTIGQVIFSVAEYKGDDASPAPLFNVETIKNQYFSAETKLICIGDGKTKRSFLSKSDLIDSELINDTINLLEVV

SEQ ID NO: 91938 - protein, 384 aa, Oscillatoria acuminata PCC 6304
MSDILNKKPNNDSGTDTLERYRYQARIALPFCLSCANQKGENLRSIVMEHFEDIVLEYSDYWHFIQVKTRNASRGLWKLNDATGGLKSLYRTFNEISDPNAKYSLWIEGTIKPDDLLMDLTSLNNISNELVEKVSKNLDIQKDECKNFLKFVTVRAELPPRESIISQNIMLMGDIFKNTPVHQLKSLEEKLTDEIFRAMSCERLPNYLYHYIAKLQDAEEEVKSRIKAKRLTASNISDIIGLDISSNSPILLQLFTDLNAPKRTKLEEKLLVAGASERIIKSAKTLRANASIHEAEILSSTLMETKVLVDVQLRLEILTDSIVEKLSNLDEPAKTIWCELLDELIKKASFIDPNQIYKQDPYLLLGAACGLSDECRIDWGVKIA

SEQ ID NO: 91939 - protein, 622 aa, Oscillatoria acuminata PCC 6304
MKIQFNKISLLGTGRDFHLQPGLNIITGSITTGKTTLIKCFRGVLGSTLKNFSREARKHITHLTGEILIENDVYEIIRPFVTTKNALVSIAGENEAERLPVLVGSSDQQTYGTWLLKKLDLPILQVLTAPTQESSSNTSPLSINDYMMYCYLSQDEIDGSVFGHTYPAKNIKRKYVFEVIYGKYDVEIAQLNIERSKKLNEIHRLKNYTKTIEEFLEGTPFDNKAQIDYDLNNIIQRLESVSSNSETLGQQIRHYANTDELRQNLLKIEQKLTNLNRERQNEQYSLEQKERLINQLRTQSIRLTKAIVAGQYLLDFDFFSCPRCGSSIQPSRSQSPIDQCYLCLQKPEPQVTQNDLIKEQKRLGDQITETLELVTSHSNKIANIEQAIRDSNKHREILVSEIDHRSRRYVSEQAERIALFEQQRTHLQEQKQRLEEYLELYNRQEQVISSIQQLEYDLEKINIDIALANNQISNFENYLNFLDNTYNEILQEFHVPSFSDPGPSIIDRETYLPRFEGRRFNELESQGLKVMVNIAHIIAHQITSLHFNLKLPNILIIDGLSGNMGYEGLDLERIEAIYNYIIKFSNLYQNRLQIIISDNTIPKVAEEYVLAEFNEDNKLIPL

SEQ ID NO: 91940 - protein, 342 aa, Aerococcus urinaehominis
MSYSDYYMNLPLDLAGSRTKNRFRVELLWGISKLIDAHEKDGDYTLIFDFKCDIELHYEDGVEFYQVKTMSRGNYNLKKLTNRTGNSNSILGKLYALYTPSEKVKLAVVCNKYLKVGKNEDLRSEVCLGELNKESLKLIKQKLIEELDIKDVSLENTFYICDGTDLNKPHHALLGKLVESFEKIKHEEPNNPNALYRLVSETAQQKACYEENITTYEDVKKLKGISRAEFDKMLESHRKKSLTGIELTRKYISGLPVNERRRYNMALTDLLNNEHSHDLRNLEVSIFDYILSNEDLIIDEDSLISNLSAEFDKEFTVEYSQEFKHIVYLKIFYIYVEGGDVY

SEQ ID NO: 91941 - protein, 563 aa, Aerococcus urinaehominis
MNVIFEKIFIFDILTEEAFVTSFDKGVNIITSSSVDGTDRGKSVLLRSLYHVLGADSHFDKKWKNQNKVYLLEFLVEKRKYYIYRHQKLFKAFDKDINIIFQTFSRTELADFLGDIWSFKIFLPNRDTKMLELAPPAYTYVMNFIDQDFYDGTKFNSFRNLGQYRNFKPDVIYSHLGVYNKQYFERIKNKQNLLEEIAQSESEYSKVNEMKIKISGLIGNIIVPENIEELENELCIKSKEYNTLLDSMNEIRYKLTNFRNEKYELEVAISQIEKYRETKEQEINSIFMNSTCPECHTVLSNTIDLRSKRYNSIEDSIYIKDSIFIAMKKVEQNIIQLENQYRYLSNKMQSYKNNINSTKDEIDNYASYKGLNDLYNSLNRDMYTEYHNQLKLKDKVEDIDEELKTVGEEKSDINKKYHALINEMVLKFGLNELEDSQYKSIHRVFCASGSNKPISTVIWYFSLNNLKKGINANSVFLPMVLDSPKNAEMDEDKEQALIKYILEGASNYAQLIFSSIGFKQGDFHFYGNLKIIELNNDKYQLLDKKSYMEHQPLLEWVLNAQLI

SEQ ID NO: 91942 - protein, 341 aa, Granulicatella elegans ATCC 700633
MGYSDYYMNLPLDLAGSRTKNRFRVELLWGISKLIDAYKQYDDYTVVFDFKCDIELHYENGLDFYQVKTKNSGNHSFKTLTNRKENSKSILGTLYALYNPNQNVKLAVVCNKYLKIARNEELRKEICLGELDKTVIDFIQDKLKEELNLSDVVLDNVFYICEGIDLINPHYALIGKLIESFQEIKNEEPNNPNALYRLVSETAQKKASYEMAITNYNDVLELKGISKDEFNKMLESHRKKSITGIEQAKNYIKTLYPAERRMYNQALTNLIEIDHSYDLNVLKASVFKYIEGNIDKIKNEDELFCVLSPIFDGEFQMEYTQIMKNVFYLLVFYIYIEGGEI

SEQ ID NO: 91943 - protein, 563 aa, Granulicatella elegans ATCC 700633
MNVIFKKIYIFDILTKKAFVTSFEKGVNIVTSSSIDGTDRGKSVLLRSLYHVMGADAHFDKKWKNEDKVYLLEFFVDNKKYFIYRHRKLFKVFNDLIQILFQTSSRTELSEFLGEIWSFEIFLPNRNTEKLEIAPPAYTYVMNFLDQDYYDGTNFNSFKSLGQYRNFKPDVIYSQLGIYDKSYFERVKIKQNLFERINDSKESYKKSDEMKGKVSNLLENVVVPENLEELERELSIRSKEYNDILHSMNEFRYKLTNLRNEKYELEIALNQIERFKNSKEKEVKFILETDICPQCHSFLNDTTDLRSKRYNSIETSIYISDSIYEDIEQISKVISKIESSYREFSNRLESYKKNIDSAQEEIKNYTSYIGLNELYNSLNLELFSELQLQEELKDRIENIEEELKKVSEIKADINNKYYEMVDSQVLRFGLNELEESQYKAINRVFCASGSNKPISTVIWYFILNNLKVCFNKKSLKLPMVLDSPKNAEMDYYKEQALIEYILENSSKYTQLIFSSIGFERTKFIFEGEIKIIELKNDKYQLLNSETFKEYEDILENVLSAQLM

SEQ ID NO: 91944 - protein, 233 aa, Lactobacillus iners LactinV 01V1-a
MCNKQLKINNKEIDFPEQCFGDLDQDVLDDVRKKLCTELNLETVCLDNVFYIFDNMDLLNPEDSIRGKLVKSFVDIKGEEPQNPNALYRLVVDSVKEKASYEFDSGTYEDVVKNKGITRSEFDKMLNAHKKESKNGVNETQEYINNLSFAKRRRYNTALGNILEMQQSESLRLIKIKIYNYIVEHEDSLDDIESYLKEISKLFDDDFDVEFTDDMKSVQYIMIYYMYASGGIL

SEQ ID NO: 91945 - protein, 148 aa, Lactobacillus iners LactinV 01V1-a
MNVIFDKIYIFDVVKKEAYSTEFKKGVNIITSSDIDGTDRGKSVLLRSLYHALGADSHFDLKWGEKDKVYILSFKVDDKDFSIYRSQKLFKIFNAKGDLIFTTIHRSKLADFFGNLFNFSIWLPQKNTNQLVIAPPAYSFLLNFFRSR

SEQ ID NO: 91946 - protein, 250 aa, Aliiroseovarius crassostreae
MYENVISFGDSVESATFLSNAPANFSPANKSNFCLSECDDESLKKITKKLEEEFSGEDTIKSELLWVSQTDLSLEDADAHAKGKLDAFVVENLGEVEFSLAALFKAVSEECDRKSRAADVDLSDFDEVVSRRGITRVDTDSWLQIVSSTVNCPKWEQIAPDIQLPALQKIRLGQEWNAYRVAVLNPNEAVRKVRRMISNYIQDNDLDALSLNELVNQVYAAVASEARAELRTATDQRIRAMILYEAYSID

SEQ ID NO: 91947 - protein, 564 aa, Aliiroseovarius crassostreae
MKRLKFRKLWLLSSREKKARVEDFSNLTTAVVADNDFGKSSLVKSLYATLGADPSRTPEPWKNAKVESLLEIEVDGSIFFVLKQAGRFALFDEGGKLTWTGNSVVKALAPKVGELLDFEVTLKLKGGKNAVPPPAFCFLPFYLDQEKGWVDTWASFSGLEMVSAYKDDIARYHTGIRPKEYYRSKAAKDEATVERGELAQERAALTKARKRFKDKRKHVGISLDVGTFEDRIKALLKEQNALQKSYDEIRNEISHLQAQRTASQEEVEIAARVLSELEADIKFSQKLSDAEIVCPVCSTVHENDFANRFGLHNDADACRIVLLESRGKVEKLESEISLQLKSIPALQTRIDQIQSILEETRGQIKLGDMLRDESERLVDGTFEEEERAIDGDIGVLNEKIAAAKKEMSAFEKKEHKDKIIEFYAGKLREFCTKLGVENVPSNMWDNIRPTIRETGNRAPRLILAYCYAVLHTINEFSTSCFCPIVVDTPLQQDPDPKNSERMISFAINERPKGSQLVLATGSLQGVNFEGREINPVNKEQLLQAEQYEPVRKFMLPFLNAVLTD

SEQ ID NO: 91948 - protein, 376 aa, Cedecea davisae DSM 4568; identical to SEQ ID NO: 91056

SEQ ID NO: 91949 - protein, 550 aa, Cedecea davisae DSM 4568; identical to SEQ ID NO: 91039

SEQ ID NO: 91950 - protein, 369 aa, Cedecea neteri
MAKNKAANAGVDALTGFEFQRNCALYLLLDNFNSFINKEFFICIEHHDDFLFCYKTDCLSYINEIHAYQAKKLSGKIWTIDSRFSEMVSKILLVGENLRNDAFEKSEDYKHQLTFISNTEIELKYSPSKALKKEGITEQILRINEQNSICAYDELHKNIQNKIEEKVTDICNEESSVFHRKELSNLKIQWVDFPRTAAKQKESLIGLMSRKFSHIADPKAAIEVILALFRNVETVYNQGQEICLLDPTKRVEGEDVKKVMNIIDSQQKAFDYWRDEAQQFSMKFRIPLSIQKNHENYILNSFELLKDMSNYDYQIIKDFVRNNDYTTQYFSLQDALTAYVDNVRKSHSINLDNIDTFFAVLCSYVECYD

SEQ ID NO: 91951 - protein, 587 aa, Cedecea neteri
MKTIIKFDRLFVVSESHNLYFDQKFSNKINIISGCNTSGKSTLIQSILFTFGINDVKDGLSEIIRYNPTFRLDFSITKGGVDKKYIIVRELGSIYLKEDGGNVFSFHGIDSDGRVEHVKLKEMLSQLFYFNMLLEQKGELKKASIECMFLPYYISQSVGWVYLRESFSNLGFYKDFKDTYLDYYLGIENSFDKEHFYKLTKERTQLQSKISSLNKYSAEPHFVVSKLLDEEFGDEAQKYIDGYIKLVASLDEERDVYTGLCNKLSLTKNHVKILRRTKRNIKNQNYNNIDRCPACTQILPYSLEGLYGYYQNINDTNKLSEQINNKIQKIQSDINGSLAKIKKLEIDISSKYSYFLEKKSQNLSVNTWIDNKANIRLLGNIHEEIEEYTKRSDEIKGLIDGMGEEQSLFVERFNKEKDFKEIFKKYLNDMQLFNVTEPRYTDLYKINSFPFQGVELHKTVMSYHFALNSLIRKTDNIHRLPFMLDAILKEDIDDRNFDLILSFVGKNLPTDTQSFISMSEYAEDNLLKDGKEISAFRRSKVKDIKNRYFPDGTNLFFIGDGKRERAFLSKPLDLNLDIFVDTCRLTE

SEQ ID NO: 91952 - protein, 373 aa, Paenibacillus terrae
MQNILASELREQAGSNSFNRFDYQAHWIVHHMIIEFKKNSQFLVICEFHDDMTKVSDIQNPNCAEFFQIKTTAQYKKWSLPYLTKTTTKRSGAVKNSFLGFLFYNFLKFKTECSKCHFVSNIGVDAEIRKWQSIIEDGKLLKTTDPALYSKIKNLIKSEFNNIDLNEFEHIFDNFVQDTYVYDGDLPLENYEKVVAGEFFKMLENDELYTSNSNKILKDIIEDVRKKSKTKIEVPISYSKLVEKKGVSSDVFSALQTNMKKISSQSYFRELEEFLTDSGLSLPKRRLLLRELKEHKLKMLDINKLLYQDVSFQIIAVIDEILLKQYARIDDIFYLLDEVKKQCENFIKDNIDFNIPLVEAMFYERLISENTTI

SEQ ID NO: 91953 - protein, 563 aa, Paenibacillus terrae
MERLLIKKLIVISDVEESSKEISFLEGLNLIIGENKTGKSSLIKSIFYSLGCELIFEDDWKNLVQKYVLFFDYGEKKYCTIREKENIKLFNIVNESKFIVLSDNKSYHEFCMALMQELDVSMDCLTINGLEVSITTPLLFRFQYIDQDSGWSKIGESFSNMKYIKDWKGNTNKYVVGYQENKYYKEKNNILKINKTIQELIIKLKYFNELLKTIQMNIEVSNTENNIILENSQVKLAFSELDNLERRKIKLEESISELKNIEYEKNLQLATLKEYIKELDKDHTYAMTQEEKIICPTCGTVHNNKVIDRLEIVKDIQSGNELIKQIRNELKELDFKISGLLEEKNQVNKRYSFLKRQIERSKELATVANTFRNEGKQEIVFTGKLERDKIMKLIIEEERNVKKIKEKIKEFNSPERRNKILTDLKTTYEGILKELNIPLKTLKLKDFVQELTKTGSEKPRIIYAYHVALYLYNLDRMVSPFNFLVIDTPNQQGQDWKNLKSIDEVLGYLLDKRGQVIIGTERETGYEEEASIVIRLMQERRTLNKKDYTSHIELFRNLEKLES

SEQ ID NO: 91954 - protein, 375 aa, Methylobacter tundripaludum SV96
MREAVLDTAHNRLQSNPLASPQRETAGPRTFEKYEYQYHWALCRILGAHELSNDYVVFIELHEDVVLATSSDVALAEFEFNQVKNVSTPPWNWRKLTLRPKGRTKKEKNSVLGKMLLGVCDKPFIDKLNSINLVATCGFNLPPKTEGLKLSIISIGEIHDECINDIQSAIDKELGSHPLPKMLTFITPDLPSTGFQDAAIGRISKLVELSVPGAKCSAQSIYRVLIDDLHRKGSVAFDYTQWSNLVKNKGMTYQDVERVISAYTENKGIESFSSDFDNITEEMGLKFNKKVGLRRALERYHNAVRLERSLIAMDKQQAVKAAVENNFSVFDEHGAVSLIEAALGALPENVKKNLIDLESAQAAIIYELISKCHEK

SEQ ID NO: 91955 - protein, 578 aa, Methylobacter tundripaludum SV96
MPNLVFKRLTIASDTLKSANQYNFKPRFNLITGNDNSIGKSTLAKLLFWTLGGDPSLDFTWQSFDVRALVDFSIGNAAYQVGRYGNTMFLRRPDGDWERFQKITGEYSEVFAEITKFSALLPNRKETTTLESPPPAYYFLPFYVDQQRSWSQTWNSFPNLAQYARWQKTIIQYHTGYLRPEFFSIEEKIAQSTLEKKNAESEVKKIETAIEVVKAYIPTNEKTVALTNSEFDELSAEVCIEISKLQATQEELFRMIAEIQTERIYLQGQLDLAKLASAELEKDYTFSVECVAGETLICPLCGTIHDNSSPNRASILADKDEADNQVETLSAKISRLDKKYIQSQERLTTTRSEIGVINSKYKQDETSSEGEAESKSEMHSFLDGLASRSVQKHVQRTMETKTALIRNINRTNRALRDDQKKLLPKEEREEMDAAFKENLAKYINVLKAQGVNLSPIESSLDYKKLYGSGGAAESTRGILAYYMAVLHQIHTAKNEVFSAVIIDTPNQQEQADFNYEKILQFLMNTIPSDAQLILCAMNRKEIGAYKQSAYVIALDDDKILSRTKYNEFRTMLNFDDSI

SEQ ID NO: 91956 - protein, 358 aa, Vibrio coralliilyticus
MADNPLAEAQRESAGASTFGKYNFQFHWALCEIIEKHKQQKEYALLIEHHEDVVIAEGLNASSATFEFYQVKNKSAKFTPANLTKREKGSNEKLKSSVLGKLLESCINTQCEDKITKIGLVSSSGFSLKTDGDLKLDVIKVGDITEDDLTTLTDNIRSELGITVLPENLQFIVPNIQLKNQEDYVLSHFARLVDKLFPGALCNPVNIYRSVIDEMGRIGRIEYDYKEWTRLLENKSLTSTQVHDVIIQHTKHPCVDDLKNDFDDLASDLGWKAKQKRGFKSKLALIALSRAGFMTSLDIELTNLFQASHDKIDEENYSDDTTYLEALRSQAIADGLLARVNNEDELLLEIIYCLLKAQ

SEQ ID NO: 91957 - protein, 569 aa, Vibrio coralliilyticus
MKGLQFQRLVLLSDSKRTANQFNFPKRLNLVTGNDNSIGKSTLVKSLFWAVGCDPHFDPHWKSNDVKAILYFTVNQNKYIISRYADGIYFGLEGSPLTKYSKVTGKFAEDFAEVVGFDLMLANRTEGIDCPPPAFYFLPFYIDQKKSWDEPWNGFEGLGQYARFKQNLIKYFGGYLPKEHFDLEEEIFEQKAIEKEANQQVVRITEAIDLLKEIAPDQTVAITSEEFQSIQREIEEELASFSSSQSNLYELQSILANEIHELEQQHLIASTSAKELDDDYTFAVENIPSDSLECPLCGIEHDNSLLSRAGLLADKESIEQQADKIKSLLETKYQEREALNQEISFVTAEIERINEKYLKEDSEEQQEKFEQAIHAVSQHKVNQNVTHKKESCQLQSKQANEQQKEIKKEQRKLVKKATRDELNELFIGNLVESINSLSATGVNLDGVKAPMDYKKILGGGAAEGTRGTLAYQLAVLRQIDHANPCEIAPFVIDTPNQQEQAKHRYEQVMDVVTENIPKGYQVILCAMDNEALSTYKQDAHVIELDGNRLLQPEPYDALRAEYEQVILNS

SEQ ID NO: 91958 - protein, 358 aa, Vibrio coralliilyticus; identical to SEQ ID NO: 91956

SEQ ID NO: 91959 - protein, 569 aa, Vibrio coralliilyticus; identical to SEQ ID NO: 91957

SEQ ID NO: 91960 - protein, 329 aa, Novosphingobium pentaromativorans US6-1
MWGLALLFQQHGTNDDYAIVFEFHDDIALLDSASNPTNVRFYQVKSKATNGGWTLTALLKREKLKTKGGTKEKPSFIDKMFDNVDKFPDAVLSADFVSNQLCGFNAGKTSFRLNECEPSHFKKIVASIQEAYPRATEAQVGLLGFQRTDLSLGDVVSHTKGKLQTFIAEQLGSVWFSPEAVYQAIADECRRKANFSGDTTSLQLAIKEKGLTKDNVQEWLDAIQSNSRSPDWGTIAPSLTYPFTDQLRISQEYAVYRAAALNSADGAVQRIRMKIAEALPTVIDDATLSLVDMVETLYLHAEEIGKKYLSPFSPSRLKAMIIYEIYTHH

SEQ ID NO: 91961 - protein, 540 aa, Novosphingobium pentaromativorans US6-1
MVFGENDTGKSHLIKSIYGAFGADASVVNEKWIKASVATMLEFSVDGAIYSIIRFDNQFALFDAADDLIWTGTSLMKEVGPKIAELLDFTIQLTTKSNDLVVPPPQFCFLPFYQDQDRGWDDSWSSFKSLAMIPNFKKSILEYHTGIRPREYYSAQAQRADAQREQNELKAERRALDRATVRLRNGRSPVTTTFSPELFGSQIEQLLAELNELRTIYEGVKHKISELQSRRAVLVEEIEIARTALAELDADVKFTQNLSDAQVICPTCNTVHENDFANRFNLISDADACRGFLASARHSLVEVEADIARQMQSLHSYDDRIKRIDALLEERRGEVKLRDMLKDESERVVDATIAAERAVIDEGIIKWQAREDEALKTMKAHSSAKRKAEIVAFYTKKLSAFAVELGVTFGAAAKKSVSPKINETGSYGPRAILAYHFALLHTIREFTTSCLCPIILDTPLQQDQDDTNAAAIIGFALKNRPRDMQLVLGTVSLHGAEYGGHVINPLVKESLLRSEEFDTVNTYMRPFINKMLGQDQGELI

SEQ ID NO: 91962 - protein, 329 aa, Novosphingobium pentaromativorans US6-1; identical to SEQ ID NO: 91960

SEQ ID NO: 91963 - protein, 296 aa, Novosphingobium pentaromativorans US6-1
MAELDADVKFTQNLSDAQVICPTCNTVHENDFANRFNLISDADACRGFLASARHSLVEVEADIARQMQSLHSYDDRIKRIDALLEERRGEVKLRDMLKDESERVVDATIAAERAVIDEGIIKWQAREDEALKTMKAHSSAKRKAEIVAFYTKKLSAFAVELGVTFGAAAKKSVSPKINETGSYGPRAILAYHFALLHTIREFTTSCLCPIILDTPLQQDQDDTNAAAIIGFALKNRPRDMQLVLGTVSLHGAEYGGHVINPLVKESLLRSEEFDTVNTYMRPFINKMLGQDQGELI

SEQ ID NO: 91964 - protein, 380 aa, Clostridium bolteae 90B7
MARKKRGPAEMPDGVNAQDIRDSKESVTVDTGSGSMSFNRFEMQISQTLHMAIELYDSLDYLLILDYYDDITLFDDEKNPEIVSYYQMKTSEDSISLNTAISGDWLTKLYAQLERPDWFVKELGLITNCPLKVTTNVKGHDGKEKRETVNYSSEKTPFTRFNPITINRVKQDIAKKQGIDVEEVDLSKFVHIRTTLSIPKHREIVEQEMGDFLNKKYPRITLDSVKTIFSAMLEVLTKRQQYELLSKDTPHNEVRVKKGIAKSDFIRIIEEAMLISIPTFEEIYKVAGFKEDEKYKASYEYTSILGDSQTKPDEFSSIFVQVRKLCANERKNTGESIWEYANRLCDELYKGNFILEALYNRMYICILIVCILINEGRRAV

SEQ ID NO: 91965 - protein, 563 aa, Clostridium bolteae 90B7
MNEMYFKSVLIADIGKHTARFQPFSKGFNVVTSQDNHVGKSSLLKSLYYTMGAEVSYDPVWDKNTKLYIVTISVNDEEYRVARFQKNYAIFHNEELILLTHGVGYDLVKKLEEIFSFSVYLPNKTTKKIEMAPPAFTFMPYYIDQDTGWSGLYNSFANIDQYRKNDRIKSLYYHLNIYTRNTVELLARKDYLMEEIQNLKEKEEKLRITYEALLDETDNLFPADTVEELEENMQIPKAQIAILVDRIGKTRNKMQSLETTLRQHEYQLEVIQEYQKIKLKEAPRANIEKNLHTCPQCGYTFDDELYNIVRSNYNFRNEDYMCQQIQLIIKSISEELQRHKDRYVELMKMLEEQEKVYDESQDAYEVYVRQRGLKDSLKHFLKQLSDNASEQSGFGTEIKKIEKELRKLPNKKEVEEKYIEYVRLNIIQLDAWNSAYEDNIKLLKPIQAQGTLENKIILAQFVGLFQTMEYFKSRSIRLPFVVDSPRAKEPSVESSKNILKLIFQVDMLPQVILATMDYADFQVQIEQKANVIVLTEKRKLLNSKDYHLHKEQIEDIIELLKNA

SEQ ID NO: 91966 - protein, 380 aa, Clostridium bolteae 90A5; identical to SEQ ID NO: 91964

SEQ ID NO: 91967 - protein, 563 aa, Clostridium bolteae 90A5; identical to SEQ ID NO: 91965

SEQ ID NO: 91968 - protein, 401 aa, Rhodanobacter fulvus Jip2
MGGGKRLGHIEPRERVGSQTGRKYEYQYERTALAALDILVGNKKQVSVYCDWHDDYVVEMDVPPTRYVFHQVKGRKSSQGPWTFREFFGVPLREESTQTKKPAAVTKAAIVPLMLLHYGNFGDSCAGLAFVTNAGLDPSLAAFLSSVGSSKDEAALPDLAKNAFDHLARAYVSADPKHASSASELFRWLREIAVYTDQGQIEGSDAAILEIADVIVDYSEIDLTLRQSKQIAREIVGLVRAKVAHSTTVVPASDEQLQQEKGIVVDDVLGVLSLSAPAYEALKAGAGSDTVKTLSRLQRFCTAKGLNEHLVSICYFKSRWDMWRTIERHNLKSADYVLLEARAHETLKGNLTMHQVIENSKDIAKQFKGSSVTQLEPEHVLGLIFSLAAQAESPAIVGLNR

SEQ ID NO: 91969 - protein, 600 aa, Rhodanobacter fulvus Jip2
MSVRLESFQYLPRGADGWGSRLLSFGAMFTAVQAPNGAGKTPIMKGVMQGLGHEVDLPPDVLARCEFAQVELSVDERPVTLTRRLGAEFEMHIDDGFNQQAFTNQAEYARWFIGLFSADLPNLTSKQSQPAELYATVLLPALWVDQDHGWTTDYWTPPNRNFIRDQRQEVMRFLVGLPPRHPFRPKTDFEAAKRSLDRTERALEMQRFVVDRLRTNEQLSDNEEPGLIERRLQLRQELEINSEAIAAIRSSSSFYNQEIEALDTQRHELTVRANSLNKQKGQLNLVLSELDGEEDILTANVQATDLLRQFCSREDCHMFKTSERSFGRSLLFLKDQIKDLKASDRDLSLDVESVEIQIKQLSYAIESKCAERDRVVNASPQGEVVGKLNGLTKELVDVELRIARVQQYAAELGKFERLLDQREQATVAVAELRPAGIRGATASTDVRQMLSEAMQQWLVTLGTQNTKSAHFDDDFTLFVDDAKFTATTHQSGSTRTRIVLAFHAALLEVSLARGGNHPGWLLFDAPKQHELSQVDFDAYTDRLQMLAVKYPGRVQVVFSAADLKTQFQVGDEVWHASFTIDGEPRFLGDVGAQEQLEIGD

SEQ ID NO: 91970 - protein, 360 aa, Comamonas aquatica DA1877
MAFLDILNDSLTKERGGRHGGKGHEFQRYWALCHLLQVDLEKDEYLLLLEFIEDVAVMNSDIAPDQMELFQLKKKEGSSSKWTKTTLAKPPKEGKSILAKLHDSKSIAKDETVAIAFVSNAPVELKLGSGDDPTGLTEFPASQIDAGLLTDLKSSVAKELGCDVSEIDFGNLKFIRSPLAMDDLENHATGRVSTFLATKFPDYSPRADVLCKAIYSEIKVKATSTEEAASFGDLKRIRGISKQQFSAMVALTLSRKSDSDVIDAFLASLAHEGVSYVQREAIKRAARQFVVEKAGRGSSLLSLLQNQVEKSLQGIPNNLVTSWEVANWIVEQVLAQEKGTDFSILDRNYMIAATLFWMNQ

SEQ ID NO: 91971 - protein, 278 aa, Comamonas aquatica DA1877
MELIDDAVTLRKVISELEVEHRKCEEQLANIYGKINRIKRKSLDIEKTLQTKKGMLRLQDVVDSQSSEVIRTAFSKDIDSLKRQLASQEKTAADAKFKVSQFDLPERTKAINDFYSERMELFASELGVHDLRDDVKKRPDASISASGSALPRSLLAYQFAVLHTAKEKGDAKHFPVVIDSPNQQGQDADHLRQMLSFIVKRTPSDQQLILAVEDMPSDFSFDGELIELTTPFGVLDVEQYDQACDELRDIVVAIEAGLEQRLASSRIGSFDEGAEPAQ

SEQ ID NO: 91972 - protein, 390 aa, Pseudoalteromonas sp. SM9913
MLEKKKPREQSGRHSFAAYRAQVRSAAMASLSILENDGIDRVYCDLHDDFVIRKKDDDGFSYVFYQVKTNGKQNHNWTLNELFGLKARTKDQKKQCTEKIKNSFIGKLLLHTVVFDNYCNSVVFQTNINNGDDVEKVIEDIEAGTFQNKFSEVLIDRFNKCFPEEVSNELSEDEIKLRLSKLKFETDVQHLKSGDDNFEPIAKNAIYKFSEVDLGHTETREILMKLLELVENKSSGVIAELTQESIEQYAGIAIEDLLSILSISKDAYNNLLESGDSKVIKSASIIQRTLSSAGASIEEVEYISRCKTNWDLWHRKNRHVLLEFDLQSINSMVRELLNSSIRSDGSLHLASLRSPIKDLVSKLESEGLMYDLNPELILGGIFAELVKGKS

SEQ ID NO: 91973 - protein, 591 aa, Pseudoalteromonas sp. SM9913
MKLISIQIFSNGLSGWQSDLLKFGDNITQLFGKNGCGKTPIVQSIAFCLGYPSVFRNDIYERCNHAILEVSSPIGNLQLKRIYSKGIDIQVTEPNGEKQRFYDEKEYSAYLFETLGLTVDNLVTNNNKSTSPYLASMLPIYYLDQDDGYNKFYSPPSNFIKDQFSEMMRMIFDLPVKHSFDQKKEKFKAKERLDYLDKQVELHSRHAEIAKQEAALISKSSEELEDEISTLESEIEQLKSSGANHDDSINVLDRLISKHKASIRDLTLEIAEINKRTSGIAQIVDEINTEVETLNLNEEARRVFLSFNEICGSSNCHLFSSSSDAYSKNLLYLKDQIKDLERNADIDKIKIEQIMKQRESLEGLIQTIIDERNQSLEKSEISALVDAISALKNQIFELQSQKSDIEKVELLENKHFQTIAERNKALEKYQSFGTDKNSIPALVKLKADLREFFLNWLEVLNTNNISRNITFKDDFTPYLGTETISQLKGSTRTRAVLAYHAALIELMALHNSFCFKFLILDTPKQHEIHNDDLNQYIKALKVLCAQHSVQVVFSTTEYHYQGDNQDIEWNPKYQGEKQLMFLKMNDNDRII

SEQ ID NO: 91974 - protein, 342 aa, Pseudomonas syringae pv. maculicola
MHIIINNYDYYKHQSFFLSIENHDDFIFFHYDHENITTWATTFQAKKASKSWTLDKTMHEIIDKIITLGAVLKSDPNVLHPEYWHKLNFLTNAAISFNDGAKKERKSILVNEANIKLEYKSIDEKIQKNIKKLVKNFNSKADINFPELDFFALNYIDLPKTYKAQKEALIGLFENTFGYSVKDHKAAIETLLSMFRDIELKFNQGNIPSLTAKEKQLCGNHIKNAFNIITSKQKAYDFWRAEGKELCKLIKISVYDQRNHEFLLSNCFDYFKDLTQFEHQKILQFVSSQTLDTHKYFDELSYIEHLFKKFKASHSNQLTETEVKFAIIAAYVETREPNENDI

SEQ ID NO: 91975 - protein, 585 aa, Pseudomonas syringae pv. maculicola
MPHTSKRESQMKTTFKFDSFFGYSETNNKYFHTIFHPHINIIQGPNTSGKSTFFQLLLFTFGINDNNEQLSDILKEDAFFRLDCTISHDQKSEKITFIRDGDTLVIKPDSKPLLRFHGISANHSAEHIKLKAILHEIFGFDLYLESKGEYKAAPIEAIFLPYYVAQSVGWVYLRKSFSALDYYRNLKEDYLDYYLGITSHGDRVAKQTLESEKMSIIQKITFLRSLENNDIDIQITKLTDESFLEESKNYISNYVERQSSLAMNEKNYISHCNTLSQLSARKSVLAKVRRNSEKQSPALDTCPTCSQRLPASLEDVYSHQQAVNDTIIEQVKVKENLKEIQGKINSLKKIISTAKDRLSFEYEILKKVSAQNINFETWIQHKATARLTTEIKTKTIALTERLTVINSALAGYNTDESIIAERANKENQFRRIFVKYLDELNVLIPTDKRYLDLYKISAFPTQGVELHKTVMAYHLAINKIFESNKTTHRLPLILDAIFKEDIDPINKNNIVQFLSKNRPKDTQLFISMAQLNNLNTPSSTGQDFSNANSKKIMIGDDATKRSLFKKYTGELKNHLDETFSLLNFT

SEQ ID NO: 91976 - protein, 389 aa, Pseudomonas syringae pv. coriandricola; identical to SEQ ID NO: 90982

SEQ ID NO: 91977 - protein, 589 aa, Pseudomonas syringae pv. coriandricola; identical to SEQ ID NO: 90983

SEQ ID NO: 91978 - protein, 390 aa, Pseudoalteromonas marina DSM 17587
MLEKKKPREQSGRHSFAAYRAQVRSAAMASLSILENDGIDRVYCDLHDDFVIRKKDDDGFSYVFYQVKTNGKQNHNWTLNELFGLKAKTKDQKKQCTEKIKNSFIGKLLLHTVVFDNYCNSVVFQTNINNGDDVEKVIEDIEAGAFQNKFSEVLIDRFNKCFPEEVSNELSEDEIKLRLSKLKFETDVQYLKSGDDNFEPIAKNAIYKFSEVDLGHTETREILMKLLELVENKSSGVIAELTQESIEQYAGIAIEDLLSILSISKDAYNNLLESGDSKVIKSASIIQRTLSSAGASIEEVEYISRCKTNWDLWHRKNRHVLFEFDLRSINSMVRELLNSSIRSDGSLHLASLRSPIKDLVSKLESEDLMYDLNPELILGGIFAELVKGKS

SEQ ID NO: 91979 - protein, 591 aa, Pseudoalteromonas marina DSM 17587
MKLISIQIFSNGLSGWQSDLLKFGDNITQLFGKNGCGKTPIVQSIAFCLGYPSVFRNDIYERCNHATLEVSSPIGNLQLKRIFSKSTDIQVTEPNGEKQRFYDEKEYSAYLFETLGLSIDNLVTNNNKSTSPYLASMLPIYYLDQDDGYNKFYSPPNNFIKDQFSEMMRMIFDLPVKHSFDQKKEKFKAKERLDYLDKQVELHSRQAEIAKQEAALISKSSEELEDEISTLESEIEQLKSSGANHDDSINVLDRLISKHKASIRGLTLEIAEINKRTSGIAQIVHEINTEVETLNLNEEARRVFLSFNEICGSSNCQLFASSSDAYSKNLLYLKDQIKDLERNAGIDKIKIEQIMKQRESLEGLIQTIIDERNQSLEKSEISALVDAISALKNQIFELQSQKSDIEKVELLENKHFQTIAERNKALEKYQSFGTDKNSIPALVRLKADLREFFLNWLEILNTNNISRNITFKDDFTPYLGTETISQLKGSTRTRAVLAYHAALIELMAQHNSFCFKFLILDTPKQHEIHNDDLNQYIKALKVLCDQHSVQVVFSTTEYHYQGDNQDIEWNPKYQGEKQLMFLKMNDQDRII

SEQ ID NO: 91980 - protein, 358 aa, Pseudoalteromonas sp. Bsw20308
MTDNVLAEPQRENAGASTFGKYTFQYHWALCKIIEKHSNKQEYALLVEYHEDVVISDSLDPKHAKFDFYQVKNQQKVFTAASLTKRVKSKPDQPAKNSVLGKLLSSCSNKQYEDRVSTIGLVSSNGFSLPTTNNLNLDIIKTGDLKEDTVAELTASIKAELGIQVLPEHLQFIIPEIQLQNQENFILGEFAKLINTLLPGAQTNVVSIYRAIADDMGRKIRLEFDYNDWERLIEKKSLTSEEVSQTITIHTSHPSVNQIKEDFNEVSKVFSLRHRQIRNLRDKLSLLALKRVGFISSLDNHLLNQFKRSGAKVDETKYESDKDLIYALLEQAKHDGLRSKVLNDDDLMAEVLYQFLTN

SEQ ID NO: 91981 - protein, 575 aa, Pseudoalteromonas sp. Bsw20308
MSALIFQRLVLISDSKKQANQFEFLKRVNLVTGNDNSIGKSTLVKSLLWSMGCEPQFDEEWKSNDVKTITYFTVNGVKYIISRYKNTILLGKKLGKLRKFTSISGEFAEEFASIVSFNCKLENRQEELEQLPPTYYFLPFYIDQLKSWSEPWNSFERLQQFTNFKPPLIKYFCGYLKPEYFEVQEQISEEKSVQKEVKKSIERITNAKEVLAETSESTVIALSKDELEKIQIEIEIELNSHSELQTQIFEKQTVLRSEIYDLEQQLKLSILAANALEKDYVFAVENVAEDALECPLCGVEHDNSLINRAGLLKDKESLEVQSEVIQKELHIKKVELDDLGLQLNFVESEIDRINKKYLIDEQENESDTKFNQALSSLAHKNIDTQINMSLQSKELAVASSESIEKDLKKQRDKLLTKLEREELNEMFMGNLLENIQTLGAEGINLSKVKSPTDYKKLLGGGAAEGTRGLLAYQLAVLKQIADVDQCSIAPFIIDTPNQHEQAGHRYENILKVIKLFIPQSFQIILCGMEHSALDSIRGEAHEIKLNGSRLLDKLHYKELKHEYDSLDISLPLSES

SEQ ID NO: 91982 - protein, 361 aa, Polaromonas sp. JS666
MPFHENLNDSLTKERGGRHGGKGHEFQRYWALCHLLKLDLEQDDYLLLIEFIEDVAVLNAASTPTELDLFQIKKKEGATGVKWTKTTLSKPPKDGMSILAKLYESKRISPDSSASIAFVSNAPVDLTLHDGKASTDHEQFSASEIEKDLKESLQKSIAGELSCTEQEIEFGSLTFIKSPLAMDDLENHAIGKVSSYLGQKFPTHSARADVFCKALYGELKIRATSTQDAVTFEELCKIRGIAKSQFNEMLATTLARKPDSEIIESAIAALVQENVPFVDRNKVKDEARRYLIDKAGRGGAVVAALEQSIDRLVPVIPSNLVRSWDVANWIEGEIATSAQASTFTMLDKHYLLAAILYRVNQ

SEQ ID NO: 91983 - protein, 582 aa, Polaromonas sp. JS666
MKSLRFKKLWLVSEASRAARSVEFNPKMTLLVGKNHTGKSTLVKHIFKTLGCETKGKTDRWDNLAISVLRFDLDGVDYLAYRRANVFALRNESTGTMKVTTKSSEWSEILAHLFDFRLMLPTHQETLAQATPPFLFLPFYFDQDGSWQKQWNSFDKLTQFSTWQKPLTSYVTGQRPNGYYLAKFEETKAKAEIGKVSHELGVVQAALVRVKKALPRVTVRMDTGAFKQEIADLLRNSTQLKQEQESLRSKAFELASVKESLSTQIAMAKDALRDLEGDLKYLTESKVDPTLLCPTCGTTHENGFPIRLELVDDAVTLRKIAAELESERQKVDESLAGIQGKLNRVKLKSLEIEKTLQVKKGALRLQDVVDSQSSEVVRGAFTKDMDSLKKQLAKHEELSADLKDKAAKFDVPERTKEINAFYAERFELFASELGVQDLRDDVKKKPDAGITASGSALPRSLLAYQFAVLHTAKEKGDAKIFPVVVDSPNQQGQDAEHLSQMLNFIVKRTPAGQQLILAVEERPQGLPFDGTVIELTTPYGLLDATLYDEISDELQNLVDAVAEGVNVRLANQRIEVLQDTSE

SEQ ID NO: 91984 - protein, 362 aa, Marinomonas sp. MED121
MGLAEALISIPQSERGGEIAQRGFDYQTCWALSQMLEYELDGKNYVFIFEYHDDVLILDDEAIPQKLTFAQIKTRESHWTASSLSSSTKAKPVSIVGKLFIHQRNFSDYSPELMFVTNASFNLCEQNGGKSSFNANEIKDEYQISFKQALRDQVKLDDARIDLSVMNFVQSSLSLEDHITHLKGKLCDFLSKKFGDSSSLSINVLVSLLERECREKSKVKSADIIDFTDLISRKGFSSLAFNGVLDSLNASNSMRPDWEMAKALFSDLGKTSIQLIPLKAAFLQVCIDLNRNTKNPSIVYLEYAVSLYDEVKLSSDLKLYVAEIMQKIDELSPDYTLALKLGKKECIVVYSIIKTLLEGGEI

SEQ ID NO: 91985 - protein, 549 aa, Marinomonas sp. MED121
MKRIYFKSVHILSLRDKKGFFFEFSSGINIITGENDTGKSSFIKSLYHTLGADVRLDKKWKDDNFISKVIICVNKRDYAFIRHEKRISIFDITEKQKLLVSSISRTDISITIRDIFDFNLELVTKSNLSQGQAQPASLFLPFYIDQDSGWGKILDSFSSLAMYKDWQKNILNFHAGVKPKEYYKLQGKINLLDIDLEEIRNTLKALEAAKKRFEESFGRVLFDVDVEYYEELLERFLRKCQDLHQEETEYRVRLIEALSLRDELVTEIEESKRQLEENSIDTLSSSGDLDAKYAVLENRDKLLQIIPEMYEQKSVYDESITGIKDDLKNAQRLSSELKGMLQEVKEQLTLQDVIKSQASKQVELTFDEQINELLQEIGKLDVARTKLAEEIAEFDNKKRTKQINEKFKESLKLAQTELGIKDPKVGTILQYGPISKSETGSRAPRAILAYHYALLKTIEDKSTNPMLPVVIDSPKQQDPDPNTAKKILDLCIDGLSNNNQLIIGSAAFLRTTDELKILTMTEKYSLLKEGLYEEVYQQIMPLYQQAALF

SEQ ID NO: 91986 - protein, 358 aa, Photobacterium ganghwense
MVDNILNEPQRETSGAETFAKYEFQFHWALCKILQKHQKQQDYALLIEYHEDVVIADSMDGQKAQFDFYQVKNKTGARYTVQSLTKRSVAKEGEKNSVLGKLLSSCVGTQYTDRITEIGLVASNGFSLDQKDNELKLDVITVGDLSEACTTELTKKITSELGENQIPNNLKFIIPTIQLENQREYVITKFADLIDSLFPKGMCNAVSIYRAIIDEIHRKGCVKYDFQDWERLVDEKSLTSYKVKEVIAVNTKHFSTERMISDLSSLKGDLGWTFLTFKGYRRRIEKLLLQRTGMLTAFEINRMKRIEDCIESIDPEQYSSLKDGFSAQVLKIKADFPVDAFNDDDEIMTEVLYLYLKD

SEQ ID NO: 91987 - protein, 565 aa, Photobacterium ganghwense
MKGLQFQRLVLVSDSKRLANQFEFPERLNLITGKDNSIGKSTLVKNIFWALGCDPALDEEWKSNDVKALLYFSIDGDDHYVARYQNTIVLDGVRYNSLSGGYSEAFANLVGFKLKLPNRDDETELQVPPPAFYFLPFYIDQLKSWGEPWASFEKLGQYRNWKPTVVKYHSGYIGPEHFEIEECICEQKKIINEANKQVQRIDSAIEVLEEVSTDTTVAVSEEQFDIIQQEIQEELSQFVVEQVRLFESQADIQTELYDLEKQLELAVKSANELEEDYAFAVEFIADDVLECPLCGTNHDNSLASRAVLLADKNEVSDRAQLIDNEILCKKSQLSVINSDLGRVKEEIARINKKYIVSEDEEKAEDAAFSSVLSCIAQNNVSKSVVRSKEEQQLISTNAEHSQKELKKEQRKLLPKATREELGEFFIGNLIENIKVLGAEGLNLSKVKHPTDYTKLMGGGAAEGTRGLLAYQLAILRQIEFARNSVTSPFVVDTPNQQEQAVHRYEKVVEVIMENVPKTSQIIMCGMENSALDVFASEAHVIELDGYRLLREENYEVYSAEVALLT

SEQ ID NO: 91988 - protein, 354 aa, Shimia marina
MSKLSSKLISTPQLEDSGSDTAKRFQYQALYGLALVFEEHKSGNDYAVVFEFHDDLAVLDSSTVPERVRFFQVKTKASGHWTLTPILKQEKGKGKISPEKLLPSYMGKMYQNVLNFGDSVEAVSFVSNAQMNFGSKSSNFCLDSCTPEEVARVVNQIKKEHPECKDVKTQLVRFVCSSLSLEDLDVHSKGKLSEFVSENLGEMEYSLDALYRAVVDECQRKSRTKCDPKSIPDLLLNRGVTKTDAEAWLTRIRQKASAPAWDEISSEVSGSFFEKNSMRKEWARYGIEALNSNVAIDAVRLEIQNQLNDKFDGEMTLMELVSEIFPEVAPKAREHLSPISDQRIKVMIIYEACI

SEQ ID NO: 91989 - protein, 563 aa, Shimia marina
MKKLKFKKLWLLSTKERKARKIDLDDNVTAVVADNEYGKSSLVKSLYATLGADPQKTPESWTAANVSSLLNFSIDQDEFYMLRFGPVFALFNDRKEPLWAVNGITKGLAPKLSKMVDFQVELTTKQGGVASPIPALCFMPFYIDQDRGWTESWESFSGTGFIKGYKDIVANFHTGMRPKEYYQAKSQKDEAAAKLTGLRKERDALNRARERVSAKRSSVGIAFEPEVFADRIQDLLKEQNALQSSYDEIKTKVAELQSSRSIALEEMQIAKRILSELEEDIKFLKKEDESEIICPTCNTVHLNDFSNRYGLMNDADACREIYVTSVANAEKLSSDIKNAMVPTIRLNERIAKITSILETVRGEMKLRDMLKDESERMVDAVFLDESKELDEEVGKADQSIASANAEMKKYDDRKHKKEITDYYVKKMVEFCKELDIVNVPSSVYKKIRPTISEAGSSQPRLFLAYNYAILHTIAKFSTGCFAPIVIDTPKQQDPDSARAKSAIEFCIKHKPKGAQLIIASGSMHAVEFAGRTIEPQKKHSVLEETQFSSVHEFMDPFIKSAMD

SEQ ID NO: 91990 - protein, 356 aa, Stenotrophomonas ginsengisoli
MAEEGGAISADRFDYQKNWALARLLTLHQGSGNYVLLCELHEDIAVLDCPDQPSRAAFYQIKTSATSAWTLKKLTNRKKGKSGDALPSILGRLCAKAAQLKQEQVTFQFVTNVGSGYGFPVTEKATEESGERLFHVLKQAEWGAISRCLADELGEDFEEPLREQLTVSISKIHLDTHNETTVGLVTNFLDQHVKGVYIPPKAFYRSLFDELRRRTVAKRPSGSISDVCKAKGIDRDSFDAMLGNARSVAHAAGAWSNVQSELHKDNVPFPVRAKLREAYPDYYSRMQDPLDAAFRRDCQILVAAGENVMANSSTLLDMANAAVALARSDSGYGVASLSPEQELIVVMMNFYEKHSQ

SEQ ID NO: 91991 - protein, 538 aa, Stenotrophomonas ginsengisoli
MTVIKGLNDVGKSSLAKSIYGTLGAEAAEIHPDWKGASVISALEFTVDGDSYVMLKEGKTFTLIESERVRGCYTSVTEGLAPALYEVLGAKLRLKNRAEKVVVPPPAYLFIPFYVDQDAGWSSPWTSFARLEQFARWREDVVNFHVGVTGAEYFDALDLQATATAARVEPAKQLDGLRSLQKRAKDTVAEDIDVEIDPEVFSEEIERVVGMLQQLVEVREEERARLSGLTQRRLQLEAQREILDRVRRELHADYMFAVKHEGEDLECPTCGQLHENSFGERFALAQDESRTDDVLVEVMNAQAIVSGEIAISRQRLKDATEDEQRFNELLTRRRGQVTFARLLERAGQKRFSSQLDDQVADLVQEIATLDYRIKQAAERLKNARSTERKKEILETYARLLTDFAGKLSVMFQEDFLKSLMLKIQETGSDRPRAILAYVYAILHLIWDAEDAVRCPIVLDSPKQQDQDDINHLNLLHFIRDERPIGSQLILFLVDDAEVDFGCEPLVLDTKYSLLSTEEYEQASEVIRGFQAIREMSAH

SEQ ID NO: 91992 - protein, 363 aa, Chryseobacterium greenlandense
MIDKTINSGPDAQNGFALQRNTAIFLLLENYFTKFQAKRYFVCLEHHEDFLFCYLNENDEVSLIEAYQSKKKSPDIWKLNNELFEILTKLLNTGKGLIQDSISKSLGYKHILYFSSNQTIYLEHKPKKSENLPTISVSIKADNKNDVYPNLPLELKEKIKTNILKTDLHSELENLSFIWIPFTTTEKEQENQLVGKIDEVFGNKIFDKRAAIDTLVYLFRKIETTYNNGNKVKLLDKTKRVGNLEVENAFNILTAKAKCYDYWHSKEADIARTLKVRPIEKEQFQLVFNSAFDLFKSIKEREHKKIYNFVKENINNLSSYTEEENVIELFELFKHSERTNFNDLQLKAILFAALFEVLYTKEN

SEQ ID NO: 91993 - protein, 572 aa, Chryseobacterium greenlandense
MKSQITYKTFFIYCEQNKTSFFTDFSDGLNIIYGKNTSGKSTIIQAIHYTFGINDEKHKLNELLNEKVIFRLDFILKKGIEENVTIIRDDDFIFIKRENQPLEKFSGISGNSSKEHIKLKRYLSELFNFNLHLETSGEYKLASIEAMFLPYYVAQDYGWVLALKSFRGLDFFRNFKYDYYDYYLGITNEFDRLEKQKLEKEKKDLENSIKFLTNVEQQKDELNLSKLIDESFISKSIEYLDSYKKNKEELIQAEKNHLLKCNELTFYEERLKILNKVNKSLKSENPLKNNCPTCKQDLPSSLENIYEYSQDVNNTIAEIQKVKDKLKELQSSINSIEESISNLKNRVAKDYSVLINYKIEDFTFGTWLENKTNVKLSENILTQIGETTIILNKKIEELGKFKTEDDIKKERNTRDYQFKKYFTEFLDELEVKKFEDDKYTLLYWMGIFPKQGVELLKTMLAYYFAFNKVIEETDYVHRFPFLLDAIFKEDIDEENRKMILGFIYRNKPKGEQIIFSFAESTKNHNSANEYNGELMKNEAKLILTDLTNERSILKYLNSEQEKYLLETLNLIE

SEQ ID NO: 91994 - protein, 360 aa, Acinetobacter sp. AG1
MNEKNILNEKERENSGLDTQLRFNYQADWAITYLLERLINEEDFVIFVEYHEDIICSNSANLNENIEFEFYQIKTTEKNFTLDNLCNFETGGNSILGKMILGVENKIFKNNVKKLCLLTISDINFKEKIKISGEKKFFSKLEKDEVSKILDNLQKELKEVDPIYQNILCFQKSNLPFQSSQTTAKGKILEFIEEKYGEIKSNIPSIYRALWDDLKLKYEFKIPYEKWDECVKKRGLQSEEVKKIIAMNIAIDLSETFKNFLEIYIDKTSTNTLLTPIKINLINEYHTYLLVNRSPEILNYLNNIRKIISSNLDLDDLNSIQLEINKLDVIINQSVQLKEFNRMKIVATYEVLNKAYEQFQ

SEQ ID NO: 91995 - protein, 108 aa, Acinetobacter sp. AG1
MKNTSNSFQFQRIIIVSQKEKSGRVLKIYPRTLITSNNNTIGKSTLLGCLFWGLGCDIRFEEDWPFLDVTVLIDFSVHNKNYKVKRDSDNIYLYDEENDKWEAYDKIT

SEQ ID NO: 91996 - protein, 363 aa, Niastella koreensis GR20-10
MTKSSATTNAGVHGSTGFEFQKHCALWLLFENYTEISGKKYFICIEHHDDFLFCFLDDAGLIVNIEAFQAKKASSAWSNGVVLSAILKKLTQTGLDLLNDTHPKQSNYLHTLSFVTNDSISLNCGSRKTQDRKTLSINESNHLVTYDSIDDALKQNILKGLSKEQVTASNQIRELDKLSFFFIDLPKTNKAQKDTLAGQISRTFGDRVADPKAALDTLLLLFRNIEYVLNSGNTARLMDKTKRVEGAEIAKAMQIITLKAKAYELWRKQGDNLAIKLQIGVFDQKKFEFQFQSSFDFFKDLSQAEHIKLRNYVQQNKNRWASFLNDAESIHHIYERFINENNTLLNDFDCKAAICAAYVELKG

SEQ ID NO: 91997 - protein, 577 aa, Niastella koreensis GR20-10
MNTHLKYQSLLAYSDKLSKCFFTHFGDGVNIVHGRNTSGKSTLFLSLLYTFGINDGNNYLADILKEKTIFRLDCILRRENIDEKLIIIRDDDTIYIKVGAGLIKRFSGINGNRAVEHTKVKTFISELFEFNLLLESKNEYKPASIETIFLPYYISQSVGWVYLRKSFSGLEFYKNFKEDYLDFYLGLESSTERVKRHELEAKLKTKLSEISSLEKLATKNDDIQLTKWSDEKFIDDSKNYIQDYAKNYDALTQEENEYVLKCNELGFLLERKKVLLRVSRNQKEQKPEIGVCPTCTQSLPLGISEAYKFFQEENDTNSELEIVKEKIRDIQSKINSLQISIKVKRDNISKDYSTLNKYVHNEVTFEKWLKNKANTELLANLSNKIGELTLNASEIKEDLKKYKSDQEIAKTRVAQTNVFSTIFQQYLSQLGIKKLIEDRHTKIYEINTFPSQGVELHKTVMAYHFAFNRVISDTADIHRLPFMLDAIFKEDLDEENRSVILDFISKNKPKDTQTILSIAQTKNQKSNAAKYNKDHFQNNAKLIQIGDGISERCFLNDDVKKYDDIINDTNELMLSSN

SEQ ID NO: 91998 - protein, 329 aa, Novosphingobium nitrogenifigens DSM 19370
MWGLALLFQQHGTNDDYAIIFEFHDDVALLDHAVNPTSVRFYQVKSKATNHGWTLTSLLKREKVKTEDGVKEKPSYIDKMYDNVDKFQGAVLSADFVSNQLCGFNAEKTSFRLNECTEKDFKKIVASVKESYPAATEALVGVLGFQRTDLSLSDAISHTKGKLQTFIAEQLGTVWFSPEAVYQAIVDECRRKANFSGEVTSLQQAIKDKGLTKNNVQEWLDAIQSSSRSPEWSTIAPSLSLPFSEQLRINQEYGVYRAAALNSADRAVQRVRMKISEAIPSVIDDPKLSLDEMIASIYGQAEETAKKYLTPFSAARLKAMIIYEIYTYY

SEQ ID NO: 91999 - protein, 251 aa, Novosphingobium nitrogenifigens DSM 19370
MKLRKLLLLSMIEEKARQETFNDRTTVVFGENDTGKSHLIKSIYSAFGATASVVNEKWSKASVTTMLEFSIDGTIYSILRFDDQYALFDAGDDLVWAGASLVKDVGPEIARLLDFTIELATKSNDLVIPPPQFCFLPFYQDQDRGWDDTWSSFKSLSMIPDFKRSILEYHTGIRPKEYYSAKALRAEAQREQNELKAERRALERATARLRNGRAPVTVTFSPELFEHQIQQLLAELNELRAIYDGVKTRSR

SEQ ID NO: 92000 - protein, 366 aa, Lachnospiraceae bacterium A2
MGKVLELEQREQAGSSSYNRFEYQVHWIVCHIIGQLENNAECIVFCEFHDDMAEFIPEKEEYQFYQIKTKEDSSDWTVAELSKREKKKSGGYKKSFLGFIYYNFLNFGVECSHCYFISNNDYDKDVRLWQSYIEDGKIVAVENNELYQRIKGRIKDEYVDSLPSNFDSVFDIFIQNTFVHKSKLQLSTYTTQTSGMFFDQLANKNIPTDTAHLIFQQLVNDVRKKSTEQIKTPISFKSLVDKKGIEISKINDKINSTISKKGNYTDFYNYLSTQGLTDKELHYFESAKTLHDSRWLNVNDIKYQEIVITLRKVISTYIECMGDFYDASVLEKECMHELLKQGLSSQSLDRTLIEVLYYEQRFSKEI

SEQ ID NO: 92001 - protein, 582 aa, Lachnospiraceae bacterium A2
MKRLIIKKLIVISQSESRSLEVPFSKGLNIILGGNKTGKSSIIKSIFYTFGCELKRIEKDWKELISSYLIFFQYGKNQYVIIRQGKKFQIFEQSKGEYLCIIESDEFHKYSNSLMDIFGVKMPCISKEGKEFNITPPLLFRFQYIDQDEGWNKIADAFDKVGYIKDWKKNTNKYVCGYLDDKYYSLQTQKAQHIMEKEEKKKELNHNQNFVEQISNSLSQLDNSKSIEEATREIENLVQQADALRKDIFSIKAEMTIYENETYMNQHKLHIVEQNLIETEKDIEFAMKQENELVCPTCGAVYSNGLTEQMNISSDYAHCEKLKMELTEALDVTENTLSDLAQKYEQISRQLESLELKIQKSQEFISYSSYYKNKGQYEMYEACGQQLDILEKKVDKISFEIAKLDDEINEMKSKKRSKEIKDKIEGNCRILADKINVPKTFIKLRDFVQVIDHTGSETPRIVYMYQSALYLYNLERTDSPFNFYIIDTPNQQGQDTDNLESIFKSLKLIMSDDGQVIVGTERETGIEDKANNVIRLIEKRRCLSSEKYNEHIELFQKLQKLALNWVAENHKKQKEVADEMIE

SEQ ID NO: 92002 - protein, 394 aa, Cronobacter muytjensii ATCC 51329
MAELHEVKPREQAGRDTLERYNAQIRAASIACLSILEGKDVKRVFCEFHDDFVIEKVIASDIRYTFVQVKTKEKLREIWKLRDVFGILKRKSAKNPQTDEMIRDSFVGKLLQHTINFGESCNEIVFLTNTHVDEDIENIIDDIVSETFSNTHCKLIIDSFNNCFISIQEDHEKLDIDAIKQNLKKLKFETDVEYIKSKHETFEILAKQKIFKFSEIELSHTEAKEILFSLLALVNSKSSVKINDCSRENIKKLAGIDIDDLLDVLSISKRAYYDFLDNGDEHALKSASVIERLLRKAGANDMEVDFFTRCKIKWDQWLRNNRHIISEFDYITIDREINATLDKLTFMHGNLFLSNLRAFINELYDSLNQNNLLHSLDKEALTGSLFSRLVERSK

SEQ ID NO: 92003 - protein, 583 aa, Cronobacter muytjensii ATCC 51329
MKLVSIKIKGRGIVGLESDELVFGKNITEFYGPNGCGKTPLLQSISYCLGYPCKFRDDIYKLCKSATLTFTIANNIFKATRDFEHTDFILSLESNKEILKFYNEADYSKYIFEKLSLNYPSLLTTQNKQSYPYLSTILPIFYLDQDLGYSKFYYSPRNFIKDQFSEMLRIVFSLPEKHSFDAKKKNINLTEEIKYLDNSLAVQRRNIEIAKDAHKDKNIESIDSSINGLKDELTELKNSKSLKNDSLVSIDAVIRNQKENLNALKSELKFMERRESSLLQIMKEINTEINTLNLNEEAKRIFRSFEEICPSLDCKMFTRSSESYAKHLLYLKDQIKDIERSLNLDSDRHDAIEQEIKHTSKTIEDLNTMRTNIIEEEDISSVIDAISEITSMLFKLQLEKNELNKIALLEAKYVEMLNKREHALDELDGLDKNRQTIPRLAKVKTTLRDKFIFWLKVLKTPNIDFNITFENDFSPTMGYETLEQLKGSTKSRAILAYRSALIESMIELNCKSFMFAIFDTPKQHEIHHEDIDNFIMALKKLSKKHNFQFIFSSTEYKYNGDDDDIILTPEYPGEQHDMFLRRY

SEQ ID NO: 92004 - protein, 387 aa, Leptospira licerasiae str. MMD4847
MQNILNSNPPDDSGADSFSRFIYQADIAFPYCIRCIIDENIVSVTMEHYEDIVIQESGDRWRFIQVKTRNPELGPWKLSDVLGESGAIHSLYRTYKEIQNFNFSLEMILEGAIKKDDDLNSFKNGSYNKLIEKKVQDKLEIDESEVKKFLSKVTLLPSPSSRDDIKVRNRDLVHSQNPRLQRDSILRIENILLTELSKAMSLDRLKEGWPKYIINPDSEIEEKIKAKTLSRITLCQLIPELQVSQSLSYLLTQITSADKSPSVVSTLERKLRRGGGTEEIISTARMLRANTQKFLIEKRIIQGAINESILDDLDIRIETQAKSRLSLYVNGDNPAIHLWNKLLEDFTSISDKIDMNQLLNADPMLLLGEACQRAEECKISFGGGYED

SEQ ID NO: 92005 - protein, 620 aa, Leptospira licerasiae str. MMD4847
MRLRITELNLIGSKRIISFEKGLNIVVGPIATGKTTLIKLLRACLGGSLENLPPEAKAVTVLEMTLTIGETQYSITRNAVSTPTSLVDIAGGNEFIRLPFTKKTDSGTKKTYIEWLLEKLDLPKLEVPSAPTKIESEASPVTINDYFLYCILHQTEIGSSIFGHLDYFKNIKRKYVFEILYGIYDIKIANLQENLRDIKTKIRISSNQDELLNDILAKTILENRDEIEHKLLETKQRLVEIEKVTISTANDIDKDSKVSEIKKSIFDLQDKIRSIEKNIALEEASIESLDLLSSQYQSQSIKIAKSISSKKYLGSIEFILCPRCGSHLDKTRIDESHCYLCLQEPGQEVTREELIKEQRRVESEFSEIIALIEERKRRISDLNNELVSLRENEKDLNEELNFRTSTFISEKLETLSSVGEERATLKERIERLESYIVIFSKIDDNRSQIDNLKEVEADLEAQLESQKTILNFSRRNLKDLSETYSSILESYNPPAFGDSTLSSINEDTYIPTFRGRKFETLSSPGLGTLVNVAHALAHQIVSIEKHLRLPNILIIDGLSEHLGQEGLDPERLEAVYKSIVNISEKYKETLQIIIMDNHHVPDFAEKYVKLRLTEAERLII

SEQ ID NO: 92006 - protein, 342 aa, Leptospira licerasiae serovar Varillal str. VAR 010
MEHYEDIVIQESGDRWRFIQVKTRNPELGPWKLSDVLGESGAIHSLYRTYKEIQNFNFSLEMILEGAIKKDDDLNSFKNGSYNKLIEKKVQDKLEIDESEVKKFLSKVTLLPSPSSRDDIKVRNRDLVHSQNPRLQRDSILRIENILLTELSKAMSLDRLKEGWPKYIINPDSEIEEKIKAKTLSRITLCQLIPELQVSQSLSYLLTQITSADKSPSVVSTLERKLRRGGGTEEIISTARMLRANTQKFLIEKRIIQGAINESILDDLDIRIETQAKSRLSLYVNGDNPAIHLWNKLLEDFTSISDKIDMNQLLNADPMLLLGEACQRAEECKISFGGGYED

SEQ ID NO: 92007 - protein, 620 aa, Leptospira licerasiae serovar Varillal str. VAR 010; identical to SEQ ID NO: 92005

SEQ ID NO: 92008 - protein, 358 aa, Pseudoalteromonas sp. S3431; identical to SEQ ID NO: 91980

SEQ ID NO: 92009 - protein, 575 aa, Pseudoalteromonas sp. S3431; identical to SEQ ID NO: 91981

SEQ ID NO: 92010 - protein, 355 aa, Bacteroides clarus YIT 12056
MNALSNLVMNQPIEKGGAWASGGFSYQCDWGMDKLLTLHKSGNDYIIVFDYHDDIVVLDGEVNLQNVDFYQIKTSHNNQWTINRLTKYEKGGHSILWKLLSHFAIISYTRNIYFVTNDYLSSSMLKIGSTSQNLIHFYDLKSTTQASIKKRLEKEDPKVNISKLDNLYFFINQLHYNLHNEIMIGRVTDFIKESNLSPDLKPKIFYDSLHNEIERKIRYATDITSADDLISEKSFTKKRFDIYLNEINNFETFKRSCENIVGILNNDKVSFKTIKELQRSWKEIQVDLMDYRNYEIRELIKYISSVYKTTEIEDDITLYQYCCKIYDMVEREYVNLMRHSEYYLKALILYIVNNE

SEQ ID NO: 92011 - protein, 561 aa, Bacteroides clarus YIT 12056
MKKIKFIQIQFLSYREKRGLTINLDYHVVIIKGANGSGKSSLIKSLYYSLGTEIEVWPQRWLDANIIYLLKFKIDGITYQSLRIGNEIILYNCDGSFRFRSKNSWEVSDKLTELLGIEFQMLDNENNVRVIPLGFLFAPFYIDQDRGWNSVWNSFYKIGIPNGKSTAQLYHAGIYTDSYNNAKNRLILIKKEIKECTRSIELIKTFIRQLKKQFDKGSINYDINKFNAEKKELVEKSEELKKLQKKHLNELSELYNQKISLEFQLQQLDNNISEIEKDYLFALQQRNILICPICQSKVENSEVGRYEMLLDIDQSKDLRLNLQSNLDDLNRKIDAVENKTQVVVEKIVAIQNLLAIKRENYSFEDVIESLVNQKLHDVIDMQRNKLMEEKNKKILLEHSLNESLSRLNNKEKQKNIEEKFSNSINKAYIALSIPNSNPKPNKITGVVKGVGSAAPRCIIAYNYSMLEIINGNSRALFAPIVIDSPRQSSIDAETMKKMNNYIIKNKPVDSQLILGINKDDEFDATNCHLIEIESNIPLLKEEEYQGVKKNIEKLLSNSFFK

SEQ ID NO: 92012 - protein, 375 aa, Halomonas titanicae BH1
MVLVDQSVNAGVRAQQGFALQRNMALFIILDNYQSKFDGAKYFLSLEHLEDILFCYLDDHGKAVKVETYQSKKKSNGSWKIGVELAEIIVKILQVGKSLIIDEYPKCCSYSHDLYFSSNTNIQLEKKVNSFVDNKKQTRTYAHAVNEENSEVIYGELDPVIQNAITTKLELHESYNNDKLFEQLENLKFLYIDFNRTNKEQENQLRSKIEDIFDRKVSDSKAALESIFRLFKDIELTYNQKSIARLSDKTKQIQSKDINNAIKIITTKSKAFQFWRDHKREVGQKLGIKPFERETFEMKFILAFDLFKSKDEAEHQKILNFVKLNYLQCNGFSEDGCIEELVEKFNNEIRSSLDDQTLKATMYAAYFEAINKMDD

SEQ ID NO: 92013 - protein, 576 aa, Halomonas titanicae BH1
MTVSVKYNNFFAYSSKGKKYFNTIFAEGINIVHGKNTSGKSTFIQAILYTFGINDEKRKLAEILNEGVIFRLDFTIYNSSSKKVSIVRDDEIVSIKVAKRPPIKFIGIGGNRSREHIKLKAFLSELFGFTLHLEYDNEYKPASLEAMFLPYYIAQDVGWVYRHKSFRGLDFVKNFKNDFFDYFLGIRNNYDRLEKSQLEKEKKDLEAESRLLHKIEQNDKKLKLAKMKDEVFAEKTNEYIKPYKENKSKLIELEKEYLSLCNKITLLEESRKVLRRVKRSLSNDILADTKCPTCSQHLSHSVEDTYSYLQDLNDTDQQLEELSRNIRNLKDSQGMLNSVINEINEKKKVVEKEYYELLEYKVDNVTLESWLNNKVSVKLSVQLERRLGEITSKIYEVEGKLSKFKTDEIVKRERRSASYTFKSIFEKHVSELKIKPFEDECFYLLYDIPAFPRQGVELLKTLLAYNFSFVEMIKKTEYIHVFPFVLDAIFEGDFEDESKNEILSFIKNNASVDQQLIVSIADSKSNANSAATYNEKHFNKNAKLICIGNNTKKRSFLEKYNGEFEDYIDETMEILG

SEQ ID NO: 92014 - protein, 376 aa, Photobacterium swingsii
MVDITESGVVINFAQEDKENEDSGAQTFAKYWYQYNWALLHILNNCISTNECAITMETHEDVMFINDTNFSNASLDLFQVKERSKTGRLTANKICSGSKDKPSVISKMISHINKKRISERINRIALVSSTGYNFDLANPEDSIDKKDYISFDHLSESVKDEIKKAVIRDLEISEIPSFIQFINGIKTTSLDESSMMIVGKIATYIDSLDPNLSSKPKLIYDAIATELVKIGCDTTRYNKWEDFLKHKTISNTQINKIIDRRSINPGVNDFESIWNTLFNYFNHEHEYNKLNFKGKVEFKNRLKKYFSLRISNKALIFDAFNQKVKSVFSECSDDSLFGTVNNIANNISSTDDFEGIFDSDDFTIVDAIFCEICECI

SEQ ID NO: 92015 - protein, 562 aa, Photobacterium swingsii
MKQLIFHQIAIISDLEKSANIFQFAPKKNLILGTANNVGKTCLSTSIFWALGIDVKQQKSWKKLDVKTALEFSICDDMYIITRYKNTMSIFYPNLSKDTFYSLKDFSLAFSKIIEFNACVQVKGVKDNYEIPYTCVQFLRSFIHQDLGWSELFKSLSIHFYTKTELNKVVDYFLGIKPDEYFEPLLKRTPLINSTKNIAKDVEKIDFVRDKLVNFRSPILKDYISSISSTSSDNNKLDYYIGQEIELKSHLFELKKDLFSLKEEHKILSQAESELFKDYQYATNNLEGQSLLCPTCGTEHDNDIVSRFSLLSERDDISKSKKKIESDIVSIRKSIKSTNNKITYVKSEILTHKVISNTPAHLEQQIIAHAKGHFDEMMQDLFLNVINKSTHEISLLDDRINSIRDFKPSKEQKDKIKTIKSEFISSLLNNFKLLNIEDMQDIDKNKIIYNFDVSGSDISRSILAYYKSLNDISAKYCNAYTLPFVLDTPFQQEQDDDNVSYIAEFLSDWDTQQLFVFGMNQASYKSLLSDKENNVIWLSSKKALLSKDNYESIRNDFDELFL

SEQ ID NO: 92016 - protein, 388 aa, Moritella sp. JT01
MVKLHDVAPREQNGRDTLSRYKVQTRAAGLASLEILNNKEVDRVFCDWHDDFVIRKVINGKTYYHFIQVKTKDKRNAQWSLIELFGVNNRNKKEEIDVVVNKITDSFSGKLLIHTVNFKDSCEKVVFLTNIHLKDEVYTLLEALDESDFSNKTLDKLLEHFPQCFCDDEQVYSTDEIKSLISKLVIESGVDYLNVEGRGFDSLARETIHQYSEIDLKNVEAKEIINSLLLLIESKSMGILSNAINEEQLDRLAGVGIEDLLGILSLSKTAFQSLKDGGDINALKNVSIIQRLLERSEVPIGAIEYAAKCKAEWDCWYRDNRHILPDFDLMTLNSALVKSIKNHHIITFDELQESVNDVALKFKGVDIFIGLSRNIILGGLFSVIVRSQ

SEQ ID NO: 92017 - protein, 589 aa, Moritella sp. JT01
MKLESLRIFARGPSGWGSGELKFADSITQIYGPNGSGKTPIVQSIAFCLGNPCKFRKDIYGHCLKAVLTVSIQGDTFKLERPYIEEDNFEIIVTEPLGTTQRFYSEGDFSQYLFELLGYDYPQLVTVRDQPTAPFISCVLPLFYLDQSNGYSDFYKSLGNHFIKDQFEEIVRLSANFPVKNSFDKKRSRLNAKNDVQSAHEKVYRIKSVYERALKSSQVSYSSIEEIDEQIEIYKTQIENSKSSKNLKVDATDNIDKIISLKMKEAREIKNELSLLERKSLSITSIKTEIEAEINTLSLNEESKRIFSSFSEICSTPGCGLFLGSSESYGKNLLYLRDQIKDLEISVHHSRVSIDILNEKLTDRLKDIEMLNADRDNVFKNDSLTTLVDSMHAILSEIVELEVQKKELENLVDLEERYISAENNREDALNKQDALSSAPSTTSIEMTRFKSNFKTTIEKWIELIKTKNISKIISFEQGFKAIFGDEKLSVFTGSTKVRIVLSYHAALFEEIIKLNPRGIRFLILDTPKQHDIGNEDLNYYIKALKVLAAEKKIQIIFSTTTYKYEIGENDKNWLATFEGFEQPMFLGQL

SEQ ID NO: 92018 - protein, 341 aa, Mageeibacillus indolicus UPII9-5
MEYSDYYMNLPLDLAGSRTKNRFRVELLWGISKLIDAYKQYDDYTVVFDFKCDIELHYENGLDFYQVKTKNSGNHSFKTLTNRKENSKSILGTLYALYNPNQNVKLAVVCNKHLKIARNEDLREEICLGELDKTVIDFIQDKLKEELNLSDVVLDNVFYICEGIDLINPHYALIGKLIESFQEIKNEEPNNPNALYRLVSETAQKKASYEMAITNYNDVLELKGISKDEFNKMLESHRKKSITGIEQAKNYIKTLYPAERRMYNQALTNLLEIDHSYDLNVLKASVFEYIKGNIDKIKSEGELFCVLSPIFDGKFPMEYTQIMKNVFYLLVFYIYTDGGDI

SEQ ID NO: 92019 - protein, 296 aa, Mageeibacillus indolicus UPII9-5
MNVIFKKIYIFDILTKKAFVTSFEEGVNVVTSSSIDGTDRGKSVLLRSLYHVMGADAHFDKKWKNEDKVYLLEFMVDNKKYFIYRHRKLFKVFNDLIQILFQTSSRPELSEFLGEIWSFEIFLPNRNTEKLEIAPPAYTYVMNFLDQDYYDGTNFNSFKSLGQYQNFKPDVIYSQFGIYDKNYFERVKSKQNLFERINESKDSYKKADEMKGKVSNLLENVVVPENLQELERELSIKSKEYNDILNSMNAFRYKLTNLRNEKYELEIALNQIERFKNNKEKEIKSILETDICPECH

SEQ ID NO: 92020 - protein, 303 aa, Acinetobacter sp. WC-136; identical to SEQ ID NO: 91836

SEQ ID NO: 92021 - protein, 280 aa, Acinetobacter sp. WC-136; identical to SEQ ID NO: 91837

SEQ ID NO: 92022 - protein, 342 aa, Mogibacterium sp. CM50
MDKEKYYMNLPKDLSGSIAKNRFRLELLWGISKIIDEHKANNEYTIIFDFKCDIELHKDDELNFYQIKTKKSGNYNSNNLCKKGKNENNSILGKLYALYSPNYNIKLAIVCNKQLKINNKEIDFPEQCFGDLDQDVLDDVREKLCTELNLNTVCLDNVFYIFDNMDLLNPEDSIRGKLVKSFVDIKGEEPQNPNALYRLVVDSVKEKASYEFDSCTYEDVVKNKGITRSEFDKMLNAHKKESKNGINETQEYINNLSFAKRRRYNTALGNILETQQSESLRLIKIKIYNYIMEHEDSLDDIESYLKEISKLFDDDFDVEFTDDMKSVQYIMIYYMYASGGIL

SEQ ID NO: 92023 - protein, 560 aa, Mogibacterium sp. CM50
MNVIFDKIYIFDVVKKEAYSTEFKKGVNIITSSDIDGTDRGKSVLLRSLYHALGADSHFDSKWGEKDKVYILFFKVDDKDFSIYRSQKLFKIFNAKGDIIFTTIHRSELADFFGNLFNFSIWLPQKNTNQLVIAPPAYSFLLNFLDQDEYIGTKFNSFKSLAQFSNFKLNVIYSHLGIYNKEYFELVKQKEELELEIKSKREEIEELIKMKDRTNLILDGFSCPETSRALENELNIETQKYSSLINEMNSVRNKLVDLRNQLVEQNITLSQISKFEIKEEKEIKTILKSKVCPECHSVLDSTLELRSKRYNHIDNALSLKDAIKTENAHIEDEILKNEGIYSNLALALEEHNKKICKNKKEIKDYIKFRGLNKLIDEINNDLTINSRIIDSTKEALKPLKKEFKGVKDKMKSVDENYYYLIDKLKIRFNLNELEADSYEQLSKNFCASGSNKPLSTVIWYLTLNDLKQKFNPEGTTFPMVFDSPNNAETDQEKKQALVEYIMESSDQFSQLIVSAIGFSEKDYSINSNINIKVLENEKYSLLNSEMYVQNYELLQCMNDA

SEQ ID NO: 92024 - protein, 342 aa, Veillonella sp. ICM51a
MDKEKYYMNLPKDLSGSIAKNRFRLELLWGISKIIDEHKANNEYTIIFDFKCDIELHKDDELNFYQIKTKKSGNYNSNNLCKKGNNENNSILGKLYALYSPNYNIKLAIVCNKQLKINNKEIDFPEQCFGDLDQDVLDGVREKLCTELNLNTVCLDNVFYIFDNMDLLNPEDSIRGKLVKSFVDIKGEEPQNPNALYRLVFDSVKEKASYEFDSGTYEDVVKNKGITRSEFDKMLNAHKKESKNGINETQEYINNLSLAKRRRYNTALGNILETQQSKSLRLIKIKIYNYIKEHEDSLDDIESYLKEISKLFDDDFDVEFTDDMKSVQYIMIYYMYASGGIL

SEQ ID NO: 92025 - protein, 560 aa, Veillonella sp. ICM51a
MNVIFDKIYIFDVVKKEAYSTEFKKGVNIITSSDIDGTDRGKSVLLRSLYHALGADSHFDSKWGEKDKVYILFFKVDDKDFSIYRSQKLFKIFNAKGDIIFTTIHRCELADFFGNLFNFSIWLPQKNTNQLVIAPPAYSFLLNFLDQDEYIGTKFNSFKSLAQFSNFKLNVIYSHLGIYNKEYFEFVKQKEELELEIKSKKEEIEELIKMKDRTNLILDGFSCPETSRALENELNIETQKYSSLINEMNSVRNKLVDLRNQLVEQNVTLSQISKFEAKEEKEIKTILKSKVCPECHSVLDSTLELRSKRYNHINNALSLKDAIKTENAHIEDEILKNEEIYSNLTLTLEEHNKKICKNKKEIKDYIKFRGLNKLIDEINNDLTINSRIIDSTKEALKPLKKEFKSVKDKMKSVDENYYYLIDKLKIRFNLNELEADSYEQLSKNFCASGSNKPLSTVIWYLTLNDLKQKFNPEGTTFPMVFDSPNNAETDQEKKQALVEYIMESSDQFSQLIVSAIGFSEKDYVINSNINIKVLENEKYSLLNNEMYVQNYELLQCMNDA

SEQ ID NO: 92026 - protein, 339 aa, Halomonas sp. TD01
MHDDFVVRLNRDDQFFYIFYQVKTNSKKNHNWTLNEIFGLSSRVKDLSKHKDIDILNSFAGKLLLHTVNFGDCCEAVIFQTNINIEDPIENLLNDIQCGKFENKIAKLLEKRFPACFSCSELSSDKVKINLKKLKFETDVQYIKLETNNFSSIAKDAIYKYSEIDLTHDEFKDILVKLVELVEAKSSGVINELSQASLETYSGISIYDLLEILSISKAAYTALIDGGDPLAVKNSSIIQRTLSDAGASEVQIEFCSRCKIEWDEWFRNNRHVLPELTVMTVQSDLASILRDTMASGRLNLSSLEKPINDYKAKIENRNYGLSDNAILGGVMAELVRVQR

SEQ ID NO: 92027 - protein, 590 aa, Halomonas sp. TD01
MKLKTLQIHSHGSYGLGCEPLDFSDHITHIYGPNGCGKTPIIKSIAFCLGYPAVFRNDIYDRCKMASLEVEVDQNFLRIERQLSREFDIEVIDRNGIRQRFFSEGEFSEFLFKILKLDYPNLVSNRGVVTKPYISTLIPLVFTDQDNGYSGVYASPGSFIQDQFQEMVRLLFGLPPKNFFDAKKERIDSKKNLEYLDLEVKRKEDELKTAKLATEVIGRSSEEVLVEIDSLESELKSITTQNSTKADSIRAFDNLISQQLAQIRTLEATLLDITKRRKSLTIMIDEINSEANTLSLNESSRQIFMSFEEVCSNPKCGLFASSSNSYAKNLLYLKDQIKDLVRNDASYSRDEMRIESQIFSNTESVKNLLAERKKQEDNSEIAALVASVSSLKDRIFQLQLQLSEYDKLSELEKEYVLYLNKRNDALEKYESTQVSRSNTPDLIRVRSDLRKLFLVWLDRLHTPSNVSRDITFRNNFEPVMGNEQISQLSGSTKVRVVLAFHAALIENLVANKSPIKLLVLDTPKQHEINNDDLDRYFKALKTVCEAGDVQIIFSTTEYKYVGDKFDATWEPRYDGDEQKMFMRSIGSSGA

SEQ ID NO: 92028 - protein, 301 aa, Clostridium sp. SY8519
MVFDYACDIEIHYKDGFEFFQIKTHGRCKSYTTKRLTKVEGEGSILGKLYVLAKGDLARSVRVAVVSNVPYNSMPADQLINCFVKLPEKDQREIEKALKKELSIDDIDFTKIFYIQTNMDLEHPDDAVRGKLTFVFEKIKKCEPTNPNALYRLIVDTVSDKACYEYSADDYEEIKRLKGLSRNQFDELLDLHAEKSKTGFQAAVEYIESLPGVKERMTYKRSLPNVLKLLSTSWNIKEIEKEISRFLLVHDVGDTDSAIDLLISKFNDRFPVEVSRADRVVLYIVILKRYEDGVYGYEDDI

SEQ ID NO: 92029 - protein, 560 aa, Clostridium sp. SY8519
MKMTFKELYLFSPQEKKAKRISFEEGVNVITSNQEDGTDRGKSVVMRSLYHALGAESHFETKWDTKSKIYILHLFIDGNGYYIYRSADLYKFFDEHKKLLFVSTHSHELSEKIKEFTGFAVMLPGRTSEKLEITPPVYNYLPFFLDQDHYDGSKYSSFKNLQQYANYKDSVLFYHLGIYDESYFELVRTKEALSEEFSAHKSRLDMLHAMQSDIESRLGTGAYSTDIDALRKDVELYRKEYADVLSKLNKCKARLVDLRNSLFEYEALLHEMSSLSDANEKEIKQLIEHKCPECGSVITETTSLRSKRYNLAEDIVTVKNELQVSIQNATQDIEKEEKKYQSLLEQLAAYEAKVKINTKQADDIIRYKGLCEIREGIIAERHDVSDLIDEEDEKLKEIAKEIRKYGEKKKRIEDKYYELLVTARTKFGLSEIEPEKFKKLTNNFVASGSNKNIATVIWYLAILNLRQEFNPNAIEFPIVFDSPNNVETDNVKKHALLQYILDNASGPQLVLSSIGFDKTEFTTKGNINVIKLENAKYSLLDDQSYTEYKNILDVLCDAEI

SEQ ID NO: 92030 - protein, 342 aa, Streptococcus tigurinus AZ_3a
MDKEKYYMNLPKDLSGSIAKNRFRLELLWGISKIIDEHKANNEYTIIFDFKCDIELHKEDELDFYQIKTKKSGNYNSNNLCKKGKNENNSILGKLYALYSPNYNIKLAIVCNKQLKINNKEIDFPEQCFGDLDQDVLDDVRKKLCTELKLDTVCLDNVFYIFDNMDLLNPEDSIRGKLVKSFVDIKGEEPQNPNALYRLVVDSVREKASYEFDSGTYEDVVKNKGITRSEFDKMLNAHKKESKNGINETQEYINNLSFAKRRRYNTALGNILETQQSESLRLIKIKIYNYIVEHEDSLDDIESYLKEISKLFDDDFDVEFTDDMKSVQYIMIYYMYASGGIL

SEQ ID NO: 92031 - protein, 560 aa, Streptococcus tigurinus AZ_3a
MNVIFDKIYIFDVVKKEAYSTEFKKGVNIITSSDIDGTDRGKSVLLRSLYHALGADSHFDSKWGEKDKVYVLSFKVDDKDFSIYRSQKLFKIFNAKGDLIFTTIHRSELADFFGNLFNFSIWLPQKNTNQLVIAPPAYSFLLNFLDQDEYIGTKFNSFKSLAQFSNFKLNVIYSHLGIYNKEYFELVKHKEELELEIKSKKEEIEELIKMKDRTNLILDGFSCPETSSALENELNIETQKYSSLINEMNLVRNKLVDLRNQLVEQNITLSQISKFEIKEEKGIKTILKSKVCPECHSVLDSTLELRSKRYNHIDNALSLKDAIKTENAHIEDEILKNEGIYSNLTLALEEHNKKICKNKKEIKDYIKFRGLNKLIDEINNDLTINSRIVDSTKEALKPLKKEFKSVKDKMKSVDENYYYLIDKLKIRFNLNELEADSYEQLSKNFCASGSNKPLSTVIWYLTLNDLKQKFNPEGTTFPMVFDSPNNAETDQEKKQALVEYIMESSNQFSQLIVSAIGFSKKDYSINSNINIKVLENEKYSLLNSEMYVQNYELLQCMNDA

SEQ ID NO: 92032 - protein, 364 aa, Paenibacillus sp. HGH0039
MLLRDLVVQKKPRETSGSRSANRFDFQKDWAILKLFELHQCKDDYLLVLDYHDDVMVLDSERDPQSAAFFQLKTKDNGVWKLNDIVKTKKGKKGLLPSIIGKLYDCKLTFPNHTLSLTLVSNACFEISLQNHVGKSTDKKSICFTDIEQKDLNKIITAIKTEHSLQEEPDFVEITFLEVTDLNIKDRETYMKGKLHEFLESMNPKNGKFRLSLIYNTIFGEVKRKNDYEWSVSDFDEVKKHKGISRSQFQEMLNYFDIDDELEQTWEEISKRLNADKVDFKKIMKLKAAWKELEIVQMDVTNEYFQSQQLVIREVLKVKEELPTIQLYQDLVESVYAEYKQREPKSMLDEYLIKAITLLEYCRS

SEQ ID NO: 92033 - protein, 562 aa, Paenibacillus sp. HGH0039
MQRLIFKEIKILSRNEQRARIIKFHPKMNLIKGENHVGKSSLIKSIYYTLGATPNVMHPKWMGAEPICLLTFSVDDIEYFILRRKTFFAVYNSVKECIGTFDKITDGLGPFLSNLLKYNIELANKENRLITPPPAYFFLPFYLDQDSWYNPLSSFARLTQLKGQWKASMLHFHTGIKPNEYYHAKGQIEIIKDSNRQLESQMKVSINVMSKLNEQMGQMILDADLNNFKKEVDELLEQYEQLKVKGEVLKRNIVDLNNEKIHFQKHIKLLEKSIHELNDDYKFALSIPDEKIDCPTCGAVYSNSFVERFSIAKDEDRCHDLLEELKMGLRELESKIKIEYELYEEHAVESERILSLMENKQGEVHLKDIIQNEGKKNLKSIVQEELDELRSQIAMNEVSINELKKEMKSYEDRKHKTKIEKYYRELMSDYLDDLGVETVPEKSYKTIISKVTDTGSGAPRAYLAYYYSLLGVINKYSTSTFCPIILDSPNQQEQDRSHWDMIKDFIITKQPLNSQLILGTVEFGDRQFEGEIIELNEKYHFLQEEDFEEVSHEINELLSFIS

SEQ ID NO: 92034 - protein, 388 aa, Methylophilaceae bacterium 11
MSISKTIAIHSKHRIKDDLDKLLSDNPKDEKQGVHATLGFTYQQWWATLRIVELLAEPDQFAVGMEFKEDVSIIDDDTTPSKIEFCQIKKNEQAGAWTLEELHKKGRKLNSGQYPPSTLAKLYQRFHDFQPYLNARLRFVSNTGFKIKVNDNSIHSHDFHFKDLTKIPSDLLKKAIGNQLNIPPTSVILKDFSLHRTNLPLNEENIFVAGKLSELNDHSKLPFKILKPTIAARVLASELQSRASNTSYCSTFGELTKTRFMSRSQAIDVLANSTSNKKSLSEILDSAIQILNSDHYPFRLVQGIENVRIQVCVDAVERTNILFINTVKALKLAYAITSSQENLSSLRSLLDETVEIAIQTSPEILEVESRHYINTAALLVIYNAIDLN

SEQ ID NO: 92035 - protein, 633 aa, Methylophilaceae bacterium 11
MNRRVTFKTLWLISEKQKKARKQPFSPTKTLLLGKNGTGKSRVTKNLYYALGATPQKLNVGLWDPETVSALEFSYNFNDYLVIHSGKLQGIFSREGLLFSSSNASAWTKFISNFFGYKLQMQRPNQSRFSQAGMDYLTLPFYLDQDGSWGTYWNTYTSLTQFKDWKKPVFESFIGLRPNAYFGQKQLRDEVANQIQEKQKEFEAQRSAFKKVEDYLPKNLPSLHMPQFRVELAAVGREALKTQQKQLSLRSKLIAAMSLKQKIRTELEIVENANKELIADLVYISDHSNFPDKAPKLSSTTSQRIRSTDLAVTSDFIIYKAMPEFNVLTENDNSILNSSVNAVDIVECPTCGTVHENSFHAKVQLSEDIESLDALKDELENRLVGVCREEATIRIDIKSVEKSLSKLDEMMQEKKSNLRLGEVIAAHSKKTLNTAFHKITSELSEILFILNQEENILNEKLKKYTDAKRVKEVNSYFASQVKSISQSLNIPPDEQIQKPKPQSRAHTGGSSAPRSMLAVHLAMMKTNVEFGDSPCFPFVVDTPQQSGQDDINLRSMIDELGRQAGDNHQVILAVEKLPDNIDTNSFQIIHFDEVKSVLKSETYIEALEKLEQPLRILRAKILSDSLSQPLATS

SEQ ID NO: 92036 - protein, 331 aa, Novosphingobium fuchskuhlense
MWGLALLFQQHGTNDDYAIIFEFHDDVALINSATNPTTVRFYQVKSKATNGGWTLTSLLKREKVKIEEGVKEKPSYIDKMFDNLHKFQGAVLSADFVSNQLCGFNAAKNSFRLNECSSEDFKKIVASVQQAYPKATEAQIGLLGFQHTDLSLGDVVSHTKGKLQTFIAGQLGSVWFSPEAVYQAIADECRRKANFSGEIKSLQNVIKEKGLTKANVQEWLDAIQSNSRSPDWSAIAPSLSYPFTEQLRISQEYAVYRAAALNSADRAVQRIRMKIAEALPSVIDDARLTLVDMVEALYPQAEAVGKKYLSPFSPSRLKAMIIYEIYAHHQN

SEQ ID NO: 92037 - protein, 296 aa, Novosphingobium fuchskuhlense
MTELDADVKFTQNLADAQVVCPTCNTVHENDFANRFSLISDADACRGFLASARYSLVEVEADVARQMQSLRAYDDRIGRIDALLAEKRGEVKLRDMLQDESERIVDATIAAERAVIDGGIVEWQIKEDEAVKLMKAHSSAKRKAEIVAFYAKKLSAFAVELGVTFEAAVKKSISPKINETGSYGPRAILAYHFALLHTIREFTTSCLCPIILDTPLQQDQDETNAAAIIAFALKNRPRDMQLILGTVSLHGAEYDGHVINPQVKESLLRQDEFENVNSYMRPFINKLLGQDQGELL

SEQ ID NO: 92038 - protein, 373 aa, Marinobacter sp. P4B1
MTKTKKAANAGVDAILGFEFQRNCALYLLLNDYDRFKGREFFLCIEHHDDFLFCYRSDCREKIEEVHSYQAKKLTGAVWTINERFAEAVAKMLEVGNDLINDPAPKCQSYTHDLIFISNTDIKLSYKPSKDEKEDGKKEITYLLNEQNFKCSFDGIPEEIQKLIDKKVGGFCKKEKIKYYKPELDNLRIEWVDLPRRKKDQKDILVGLMCRNFPHVSDPNAAVELLLSLFREVEAVYNQGRIINLLDSSKRVEGGEIKRAIDVIETEQKTFNLWRSYSTELSRKFKVPIGIQNNHENYIRNTFELMKDMANREHQIIKSFVRENDYSMDFYDHEGMFYKYVYDIKNGNSINLMDVDIFFSVLCAYVECHGGDI

SEQ ID NO: 92039 - protein, 589 aa, Marinobacter sp. P4B1
MSVTITFNRLFVSSGSHNLCFFDEFSSGVNIISGRNTSGKSSLLQSLLFAFGINDVRENLAEILSYNPTFRVDFTKSVDGFKEEYIIIRESKSIYIREPEGKIVPFHGIDADNSVEHVKLKDYIRNLVGFTLLLEQKGELKSAPLESMFLPYYISQSVGWVYLRESFSNLQYYKGFKDDYLDYYLGVNNSFDRVEYRELARKRDRLTADIQNLNRYSKKSEFQFSNLVDETFGDKAEEYIENYVKKSSCLEEERIKYIKLCNELSLLQNHHKILKRTRGNVKRQKYNDVDRCPACTQVLTYSLEGLYSHYQKYNDTVELESHIADKLTTKKSQIHSSNKLIEKFRKEIHEDYGDLLSKNVDGVTFDQWVDNKANVKLYKKMQKDIGDSESELDAVRSSINSMNTEQETVSARKAKEKDFKILFSDYASQLKLNPLADSRYLSLYSINSFPRQGVELHKTVMAYHFALNAIIARTKVAHRLPFLLDAILKEDIDETNLKTILSFVSNNLPEDTQTFISISEHVKSDPEIRDGKDIKPIEKISVKDVKDAYFPEKSKLIYIGGGELERSFLSQSLEDYQELYGETIDLTAI

SEQ ID NO: 92040 - protein, 361 aa, Klebsiella michiganensis; identical to SEQ ID NO: 91038

SEQ ID NO: 92041 - protein, 550 aa, Klebsiella michiganensis; identical to SEQ ID NO: 91039

SEQ ID NO: 92042 - protein, 362 aa, Marinobacter sp. AK21
MHNTIQSDLITVPQTETAGSRSPARFAYQRNWALAELIEYHLEGKDYVFAFEFHDDILILDSEVNPSILQFIQVKTKTTGQKWSVHQLTTSEKGKNGYPDKLSIIGKLYENKKNFADHSSQLRFVTNAYFSFVDPVPVTIASQLEKKDQDKITNAVQAQLGAGAVDLNALQLEQSSLSVDDHEKHIRGILHNFFEELFGSDHNIAVSPWYQSISDQIKLKNNYPSAQVKSFDDFIRNKCITKSEIDDFVQRVNRSHNSRDNWDIIKSQLQTEGFGFQELIKLQRSWQKYATDRLDYDNNALKNLEIDISNAVSTTSFGDSPTLKDVISSIRKDLSKKLSKLASIFDSHYIDSIILWQYCEQL

SEQ ID NO: 92043 - protein, 571 aa, Marinobacter sp. AK21
MELNQLLIKQLTILSIPEKSAKTVTFHPQRNLITGENDVGKSSIIKSIYHSLGADVHFDSVWEKADAISLLTFSYSNKDYMILRSRDHFGLFDIHGNLLKSFDSIIKGLSPYFAKLFNNRLLLKQSKTNQRIPASPAIQFLPFYIDQDKGWAKPWDSFEGLGVFGGFKRDLINFVTGIRPNEYFLLSERIDQLSAKLTMLKNESGVLVSAKKTVEKHIPNATFDIDIKAFKRDIDRLLVKLEVLKNKENEYRKNLIKQKNKEVFIDNEIAIVSKSIREINKDYEHSLNDLDCEITCPTCNATYENSMVSRFGLLEDIDTCRSLLSDYLEEKKKITKEVTKLENQLNLQVAKVREITDLLNEKKGKVRLKDLIQNESSKQVKEIFNRSQSNYSTQIGEIEEQKSGLEIDRSKLNNKERKESIISRFNTLIDLFLIKLNVHTLNSDWFSDIPLSVKSQGSDTPRALLAYYYAILFTSKEFTSLPLFPLVIDSPNQQDQDATNRNKIIKFIFDNTPDDYQLILGTVDLHGVEYDGHTISPATKLQLLDKDEFEDGYNKIAPLLDRLQASLIAES

SEQ ID NO: 92044 - protein, 382 aa, Burkholderia sp. BT03
MKTIEMVAPREDVGRDTISRFDMQFQAAAFAALEILEGNGVDCVYCDYHDDFVVQRIVDGRTTYHFFQVKTKRKPNHQWDLLEIFAYKKRGQRTDADSLARIRSSFAGKLLVHGIVFDEACTEATLLSNVHFTDDVITVVDEFRGRTPKSKCAAFLAEHFSAIFTVEPERTSQLLSKLSLRAAVPYIGDDREVFASAARAAIYKYSEVDLSYHETNEIADSLVDLIYRKSKEPLGEIQPHELQARIGVALDDLLRVLSISRSVYDALRGGEAPKALKTASILQRWLKAAGATEEMIEYASRSKVSWDGWLRRARHIYTPFDMNFLLDRIDKLYTKWMQGIADFVTLHALLGELGEEPICRKFEGLSSELLLGAVCSVGVRRR

SEQ ID NO: 92045 - protein, 208 aa, Burkholderia sp. BT03
MRLLTLKLQARGVNGWESPTLEFGRRLTSLFAPNGSGKTPIVQALAFCLGFDTKFRDDIREKCEAVVLTVQHRGGDLTIRRTITTDFHASIDAGDRRREFFSEGDLSRVLFEELGMTVPALVGTNRQLTRPYVSTVLPLFYVRQDGGYNEPYRAPATFIASQFVEMVRFAFGLSPRHSYNARREGCVALRMAGRGSFDMVRTVYVTSE

SEQ ID NO: 92046 - protein, 387 aa, Herbaspirillum sp. YR522
MATIEAVAPGEDVGRDTISRYDMQFQAAAFAALEILEGKGVDCVYCDYHDDFVVRRNEDGRVSYHFFQVKTKEKENHQYGLNEIFGLTTQAVKATPDRLEKVKSSFAGKLLLHGIVFSENCGEVTLLSNVHFEDAVVTAVDELRVKTPKSKAAKFLSTHFSAIFELKDADDVDHEEVLAKLSLLPAVRHIGRDRSAFTDAARSAVWKYSEIDLTYHEIKEVAEGLVDLVGRKARTRIANVRPEELVDLVGVQLDDLLGALSISRTVYDALCAGEDERALKHASVIQRCYRKMGAEEGMIDYAAQQKVNWDIWLRSARHNHKEFDLNILLHRIDTLFAEWQRRGADFPLMQELIQSCVEEPAIKRFSGLDEGLLFGAMNSVLVRKHSR

SEQ ID NO: 92047 - protein, 593 aa, Herbaspirillum sp. YR522
MRLVSLQFIPRGIHGWESPELEFAQRTTSLFAKNGSGKTPLIQAIAFCLGFATTFREDIRERCSAIVLKVELNGKILEAQRELSAGEFHLTTRIDGETRDFFAEGEFSKLLFQSLGMAEPLLVDNKRGATKPYISTVLPIFYVKQDGGYLDAYRASANFIQDQFVEMVRFVFGMAPKRSYSASKDLLEAKQQLELLQRRIVAQQHGVVDLAARVDDSPAATEAMAARSDFLALQLNDLKASADSADAASDALKELLNAKDEKLRGLKRQRYELSTRVTGIDSIRSEIDGELQTLTLNEQSRRAFEIFGEICNKPDCGLFFVDSVSYAKNLLYLRDQIKDLEANAVRAEIQLEELDRRIDEDEQDRQLIVTKLEALPQNTATDKLIAAVQALTKELLEIEQQRASVNVLVELRRKFYQLEQEREKLQDRIASLSSNVRGELEFLQLRAKIRESLVKWMDILHTLNVSHEIDIDANFRFKFGTEPLDVFTGSTRSRLVLAIHAAMFEAYLEGKERHFRFLILDTPKQHELDGADLANYLKELQLVCDKYGGQIIISSTEYRHPIGANDREWLPEYPGTEQAMYLGKPGTNNEELA

SEQ ID NO: 92048 - protein, 380 aa, Clostridium sp. Maddingley MBC34-26
MAAKTSVLSASAGSSKVVSKKNKQIKDITIDTSSGSMAYNRFEMQVSQTLHMAIELFDSLDYLLVLDYYDDIALFNNEKKPEVVSYYQMKTNEESISISTAISEDWLVKMYAQLERPEWLVKELGLITNCPLKVTVKINGFDGKKKNQTKTYTAEKTSFSKFNPITIDKIKHDIAQKKGIKPEDVDLTKFIHIRTTLSISKHREIVEQELGDFLHKKYPRITMDVVKTISGSMLDILTKKQQYELLEENALYNEVREKKGITKSDFSRVIEEAIVISIPPFDEIQRVADLSDDDKYKASFEYTKIMSDSQSKIESFSNIFIKIRKLCSNYKKNSDECVWQYVNRLCDGLYKDNFIIESIYNRMYICILTICILISEMRRV

SEQ ID NO: 92049 - protein, 561 aa, Clostridium sp. Maddingley MBC34-26
MNEMYFKNILISDIQARTARFQEFSKGFNVITSQDNHVGKSSLLKSLYYTLGTEVDYDSVWDKRTKLYIVTICVNGIDYKIARFQKSFAVFKEEELVLLTRSVTHDLAKKYEELFSFAVYLPNKDTKKIEMAPPAFSFMPYYIDQDKGWSGLYNSFASIDQYKQNDRIKSLYYHLNIYTKYTVELMAKRDQIKDEIEKLKKEEERIRITLEALSQETQNLLPAETLEDLERNLQIPKEQIATLVKKAGEVRNKIQSLEITLNQHEHQLQVIKEYRNIKIDVGKTDQKGLYTCPQCGYTFDEEIYEIVRSNYNIQNEDYMCQQVQLIIDSIVEELDRHKNQYVELMADLEELEKVFDESQDAYKVYVRQRGLKDSLTHFSQQLSYNSLKQSEYADKIKKIAKELRKLPNKREVEEKYIEYVRLNIISLDAWNAAYEGNIKLLKPMKAQGTLENKIILAQFVGLFQTMEYFKSSAIRFPFVIDSPRAKEASNSSSKDILKLISEVDMLPQVILATMDYSDFGFEISHQARITILTEKRKLLNKENYESHKHFINQLLELFKNL

SEQ ID NO: 92050 - protein, 359 aa, Acinetobacter sp. NIPH 542
MKNLNILDDEERENKGLDTLLRFEYQIDWAIYHALDKLSQKQEFVAFIEFHEDVLFANSCAFNPSTRFELFQIKTTYKSYTPASLTALKGPNSTLGKMILGIKDKLFEKQVDKLCLLCLEDINFSHKIQDVDKDYKFSELHENDKKILKNAISNELNFTIDSKYEDMIIFRKTALNLEQSDRQIKHKIQDFIENTYGDVGMRPPNIYRVLADDLRPKSQHKKRYEFWEDCVKYRGLASQTISEHIVKNTDQNVEIELKELIESQLTEKGEKSIKISRILKKVREYFLFKTCISSAVVQNELDQFLSEISLPLDIDDEKTYWESIDLLDKKINEHVLLKEYNKLQAVAIYEVFKVLYDQF

SEQ ID NO: 92051 - protein, 563 aa, Acinetobacter sp. NIPH 542
MQNTKSYFQFQRIVMRSLKERGGKVQKLYLRTLIDSKDNTKGKTTLINSLFWGLGCEVKFEETWCDDLETLISFSVADKNYEIYRNNEFISIVSEDEDKSYKYPIKSKKVDSDFIEKLNEILNFNVLLKYAKAKKLSRVPPSYYFATTYIEQMTGWANFWLCFQNMNAFDKNNRTELIKYICGVLDKKYYEKKYSENIITQEKKEIEKTLERENCNFTYLKGFETEKYLNNVFRKSLTLENYEKKLLTLRNEYLDKASNLSSLTNEIELINIAIGELEQDYEYSVRNVDPFEVTCPTCGVIHENDIVNKFSILKDSDLLLKRIERLIEEKNKTRQELHKLSKLIQFEEENINELMDQNDVQEYLDYSVVQKKMIPAIQRRINHNQILIEEKKNLITESKNERSLIEKENQQDLEDEFVDYFERLCRELEITRGKKKNFTEILNHTSGGANGIKHMLAVRLTLLHAMCTYAESSIPPFVIDSPRQQDINDYNYGLVLKAFDKIPENVQFIVAAVKSQPISEIRDKFEEIFIGKKLLSEDEFDISSLLINKHENKIIFIDLDIKQ

SEQ ID NO: 92052 - protein, 367 aa, Acinetobacter sp. ANC 3880
MNKKSVNGGVDAQVGFDFQRNCALYLLLDDYGSFKEKNFFVCIEHHDDFLYCFRSIEGVENINAYQVKKLSGNIWKIDTRFSEIINKILCVGEDLRNDDILKTEDYNHKLTFISNTEFELKIKPNKNEKENGKIDIITRINETYPICRYKDVHKDIRVKIEEKIEEYCQNQDGKFNSVELENLFIQWVDFPKTPKEQKRSLIGLMKEKFPNVTDSKAAIDLLINLFKEVEVIYNSQNLAKLLDVSKRVEGDVIKKAIDVIEFEQKTFDLWREISKEVIAKFRFSIAIRKNAEIEISTTFEYLKDMNNYEHQLIRDYVRNNDYSFSYSDYPEMFQGYIKNIKKVNDINLSEKDCFFACLCSYVEYYGG

SEQ ID NO: 92053 - protein, 581 aa, Acinetobacter sp. ANC 3880
MKAVVHFNRLFVASEKFNKCFLEEFSLGLNLIGGRNTAGKSTLLQSLLYVIGINDVKQNLEEILEYDPIFRLDFTINNKEYKVVRDNLSIYFEDYNGKISSFNGINSDNGIAHVKLKEFISSLLNFNLMVEQKGEIKKASLECAYLPYYVSQSVGWVYLRESFSNLGFYKGFKENYLDYYLGINNNFNKEEYIKLVELVKELGYEIKTLQKFTKKPEFIFFSFMDEEFGEDAKEYLENYVKDIDDLQEERNNYIKYSNKLALLKNQYKILIKTKNNLKRQRYNDLDHCPACTQVLSYSLEGLYSYYQKINDTNELEEKIKDELKKAYSSVNNTKKRLNEKENTINENYKALGDKFHGEISFNSWVKGKANFQFHRQIELDLYKKINEKEEYNLKLKDMATDEKVIQNRIGKEKEFAKIFKKYLSDLKINSLNQNRYLDLYKINSFPYQGVELHKTVMAYHFAFNKVIGETKNIHRLPFLLDGILKEDIDQTSLNDIFSFISKNLPLDTQTFISIAEHVKEENIVNSPLKAVNLKILNFQFFKGKAKNIYIGNGTEQRAFLKNDLNKYRYLFNDTLRIIAEA

SEQ ID NO: 92054 - protein, 346 aa, Oscillibacter sp. KLE 1728
MNIRIREQAGTDSVRKFDYQMAVALDYLLSEIDSDTIILIETLEDFAVFRNHGTEFEEIEIYQVKTKNSGLYEKRTLLSDNVLGKIILTDFYFNSKSKTLNIVCNTPLKGASTETLDNFVFENSLTPKELTELKLNVKTYLSKESDFTGSLESYWGKLIYIKSSLPFSGKEDRYSETLVGKTNSVISHYLGDENHSINPQIVFNTLRLLIDKQRRNKITTSEIDVEDALSQKGIRTSDVKAVIDQAAKFQHLTKNEIFQHASQIFSPAEFLAIKSEYPTFLSYRANLSDQAYQDALKILQEEYWSLTAKYDSLDEIIRITAQNCCQKIPYYSLAIIQIMAIVIVYS

SEQ ID NO: 92055 - protein, 558 aa, Oscillibacter sp. KLE 1728
MSIFYKSLLILDKGKNVARKIEFQPGINIVTSHLNSVGKISLSLMLLHSFGAKVRFSDKWDLSNVFTKLTIQKDSSEIEIIRHRDTYTIITGDEKYYYPLQKNGYAEKLYELLGLTIKIKDKNSDTYSTAIPSLYLLPYFLSQTKTDEDRSVFEDLNMYLKSDLRDALYYHVGALDNHYSSVIQQLTQSRKKLEELRKSREKQISEIEYLERKLAESKSAKLIDSDADLDADIAVYQKYSKKKQDYYSLVKTQSDIKHKIKLLNATLKDNLVYTAKLLDGEDIICPVCNSNITDFISSALKVGIAESDINTELASLKADLLNTDRKIALAKPKLDELHQEIMLIEQQRENVKITRAIIVWNEELLVAKKNFAEIQLQIDSLEASIKGYSEEMRNYNEKKQSADKSYRSAFVTLLNATNISTDGLDISSLNLYDSLHLSGSEIPRVAISRFFSLLESKTADSIVMPIIFDFPNLDMTEENLTKCFQVMCEKISDTKTYPQSFIFSINCEERISKAGASLEKINIIDIESLPMDDSANPKLLCKHDYSAYSKEISEMINS

SEQ ID NO: 92056 - protein, 346 aa, Oscillibacter sp. KLE 1745; identical to SEQ ID NO: 92054

SEQ ID NO: 92057 - protein, 558 aa, Oscillibacter sp. KLE 1745; identical to SEQ ID NO: 92055

SEQ ID NO: 92058 - protein, 197 aa, Lachnospiraceae bacterium M18-1
MDSDVVLKDTYYIYTSMDLFNPQNSLLGQTVNFFVELTGKEPIKVKALYRLLVDTITLKSNYELECKEYKEVIEKKGITRTEFDNMIQKHIDISDAAVVGAKALIDDTYPLFSDRVKIKNALTQIVQDLILNKALRKTQDQIIQYISQHLEEFDKTIAENVKFLVKHFGSLFSIEYSIYDKQALCILILAKFQEGLL

SEQ ID NO: 92059 - protein, 565 aa, Lachnospiraceae bacterium M18-1
MKQLIINKLYIFSIKERKARSIPFQKGRNVITSSSIDGTKKGKSVILKSIYYTLGADCYFEDKWNVNDKIFIMDFSVANVNYYIFRNQRLFKIYEKQPFIEIFQTISRHELAEFLKNIFDFAVELPNREGILEIAPPAYNYILNYLDQDKMDGTNFTSFKGLTQYADFKDKVLYYHFNVYNKDYYSIVKQIENLSSECEKLEKDVILNQNMVARVNRNINNSDYSVNMDNLQSEIEKSKEEYAIIIDKLSRTKKILINLCNEKEDLISHMNSLDIFTKNINNDIKKIVNHECPYCHSVIADQMELRIENYNTVEDALFLKTELEASLIEIERKINKEEDRYREHLEKLQKYEERIKINTQEVEDVLKYKGYIEIRESLLKELGELTSNLNKKKNSLDDKKKKRKEYNEAKNKVNNKYYKLMVADKLRFGLVEIEDKKLEDIKSTFVAGGSNKPIATIIWYINLLKLRREFNKEAIQFPIVLDSPNNVETDEEKKHELLKYLFEIVDDDTQLIVSTLGFTQDEFPDISFSNVIELNNEKYKLLLENEFEQEKSFLFQFMSKAELQS

SEQ ID NO: 92060 - protein, 366 aa, Lachnospiraceae bacterium M18-1
MGKVLELEQREQAGSGSYNRFEYQVHWIVCHIIGQLENNAECIVFCEFHDDMAEFIPEKEEYQFYQIKTKEDSSDWTVAELSKREKKKSGGYKKSFLGFIYYNFLNFGVECSHCYFISNNDYDKDVRLWQSYIEDGKIVAVENNELYQRIKGRIKDEYVDSLPSNFDSVFDIFIQNTFVHKSKLQLSTYTTQTAGMFFDQLANKNIPTDTAHLIFQQLVNDVRKKSTEQIKTPISFKSLVDKKGIEISKINDKINSTISKKGNYTDFYKYLSTQGLTDKELHCIESAKTLHDSRWLNVNDFKYQEIVITLRKVISTYIECMGDFYDASVLEKECMHELLKQGLSSQSLDRTLIEVLYYEQRFSKEI

SEQ ID NO: 92061 - protein, 582 aa, Lachnospiraceae bacterium M18-1
MKRLIIKKLVVISQSESRSLEVPFSKGLNIILGGNKTGKSSIIKSIFYTFGCELKRIEKDWKELISSYLIFFQYGKNQYVIIRQGKKFQIFEQSKGEYLCIIESDEFHKYSNSLMDIFGVKMPCISKEGKEFNITPPLLFRFQYIDQDEGWNKIADAFDKVGYIKDWKKNTNKYVCGYLDDKYYSLQTQKAQHIMEREEKKKELNHNQNFVEQISNSLSQLDNSKSIEEATREIENLVQQADALRKDIFSIKAEMTIYENETYMNQHKLHIVEQNLIETEKDIEFAMKQENELVCPTCGAVYSNGLTEQMNISSDYAHCEKLKKELTEALDVTENTLSDLAQKYEQISRQLESLELKIQKSQEFISYSSYYKNKGQYEMYEACGQQLDILEKQVDKISFKIAKLDDEINEMKSKKRSKEIKDKIEGNCRILADKINVPKTFIKLRDFVQVIDHTGSETPRIVYMYQSALYLYNLERTDSPFNFYIIDTPNQQGQDTDNLESIFKSLKLIMSDDGQVIVGTERETGIEDKANNVIRLREKRRCLSSEKYNEHIELFQKLQKLALNWVAENHKKQKEVADEMIE

SEQ ID NO: 92062 - protein, 365 aa, Edwardsiella piscicida
MESEIEMDNPLASPQRESAGADSYDRFEYQYHWALCQAFSAYKNARDFAVFMEYHEDVIIADSLDKEKVKFTFNQVKANSSGSYTINSLTKRDKGKNGEKPSLLGKLCSSVHKKCYLSKVTELNFVSTIGFNFSPKDGLKLRALGLSELNSGDLSLITNNLNKEIDEFDAFPKEIIRFVYSDIPLQSYYEHTITRITDSVEVVFPKHLLKPKDIYRVLMDALRIRGKDTFDYDKWDEVLVKKALTFDDIHKVVTNGISGENSGVDLETAKYVINDLTINGLEKGRLLKEVKAYTLRVLSPSLAMLEAQKSIQEVIVKNRNQIGDNITYDFLQRLSAEIPERTKYILDTERTLIAAIIYEIISSEI

SEQ ID NO: 92063 - protein, 129 aa, Edwardsiella piscicida
MRKLVLEKITIISHSTKSARQFEFGRNLTLITADDGNSVGKSTLAKMIFWSFGCEPLFSSVWKELDCSSIINFSIDGESISIHRYKNEMSFRKPGQLLKVYNKITGAFAELFAELVKFDVLLPKKTVLI

SEQ ID NO: 92064 - protein, 342 aa, Tissierellia bacterium S7-1-4
MSLEEYYMALPKDLSGSITKNRFRLELLWGVSKIIDAHKEREDYSVIFDFKCDIELHKEQEMFFYQIKTRKSGNFNENNLCKINNKENNSILGKLYALYSPNQNIKLAIVCNKPLKIRTKDIDFHEKCFGEIDKDAIDEIKNKLRIELNIDSVNVDNVFYIFDEMDFQHPEDAIKGKLISSFEEIKNEEPQNPNALYRLVMDTVKQKAAYELDVKDYEEVKKKKGITRTEFDRMLDSHKKESKNGINETQNFINTLSLKRQRKYNIALSDLLEIQNTESLRLIRVQIFNYIRENEDSFIDEEDYLNKISRVFNNDFNIEITNDMKDVQYLIVYFIYATGGEI

SEQ ID NO: 92065 - protein, 560 aa, Tissierellia bacterium S7-1-4
MVLTFDQIYIFDINKEEAYTQTFYKGLNIITSSEVDGTDRGKSLLLRSLYHSLGAEANFDPKWNEKDIVYILKFSVDDKKYSIYRSKRLFKIFDDENQLIFKTIHRSELAKFMGELFGFTIFLPNKNTKQLEVAPPAYSFILNYLDQDKYEGTKFSSFNNLAQYSNFKINVIYTHLGIYNKDYFELIKQKEEIESKIKTTKEEIQELDKLKNRTLAMLKGFSCPETSNALENELKIESKEYSLLMNKMSEIRNKLVELRNQLEEQKIALNQIDKFAKKQEKEIKNILLTHICPECHTILNDTINIRSKRYNNVDNAIELKDTINVESIKIKEEIEKYEKEYSDLAVHLKEHNEKISSSRKEINNYIKFKGLNDLIDKINEDLLFNKGMLLQAQDDIKPIKKEIKEISQRIKSVDEDYYCLIDKLKNRFNLNELDDTIYQNLSKNFCASGSNKPLSTVIWYLTLNDLKQKYNSKEIEFPMVFDSPNNVETDQEKKMALIKFILESSNKFNQMIISSIGFSKNEYEIDSEVHIKILDNDKYHLLNEPDYIQNYEILKYMNDA

SEQ ID NO: 92066 - protein, 361 aa, Clostridiales bacterium oral taxon 876 str. F0540
MDLYTRILNTPQRENAGALAGNRFQYQYHWALLKLLKLFETQEDFVLLLEFCEDIIVLDSSDDPKEIDFYQIKTNAKANSFYWNLSDFTNAGTSKKPKQSFAQKLIDNFIRYEGNIKQIHFVSNKHFKFKEVNTLSSNVVSLESLTDDEFKKIQENICSNCKQGNCNNECKKLIVFNVSELSLENFRQTCLGILYEFLDKHCNSKSIKHKAIYETLISEIERKSNLEKIPDKKEELIKLKSITRQQFLQQLMLIDRNSQMYYEWNIIHTDIAQHFNMIETAKIKKAFEKLIVDVLNPDNLILHDIISFVQLKLSNIEDSLNDNVKKFIHEVVVDTRSTKKVSTNIYDDYYLIAIILRELKK

SEQ ID NO: 92067 - protein, 580 aa, Clostridiales bacterium oral taxon 876 str. F0540
MKKVLLKSLSVISPKLKQAKTIKFDDRLTIITSEDQNGSSINHTGKSLMIKSLYYALGAGLSKYTRNWRELNIVTIIKFVYSDVMYTMFRCGNSFVIVNKNTDVVHKFMSVSQLKEFYVNLFDYRLKLLLKKADDEKTELHSPYPSSLFLPFYIDQDVGWDGTWKSFSDLSMYKDYRNEIFAFHTGLRNNEYYDLLVSKIEKEKLVISNSQITTKYQITLEENLRRYKDVLDLNIEPESFKNELDALIKLLNNFQEQKEQYRDILLDKYNKKLEVLSSLENVKIVIGELEKDVNFINKNIHDEVIYCPTCGVKHQNTMSTKYMLYLDIEECQDKIAQYNAILNKLEKEINDIEDNMQQLSKKAQRISEILNKKRDAIQLRDVLVAHGIKEYITDLTQDIRKLSEEIDKENERISKLKTKIRQIENSSKIIKESFNSYINTYITKLGISDISIDEIKNIGEIVKSGGSDLSRAILGYIFAYFKLIEANKDAIIFPIVIDTPLQQEQSTESTDNIFDLLLDNQPENAQLIIATTSTHGKKVNGVKYEFLIKQGVLNDNDYIECEKEYLHYLAILAEADNDKS

SEQ ID NO: 92068 - protein, 495 aa, Burkholderia sp. AU4i
MIASAIKVACRLTAPRCTYPKEFSTLRDFWLASCSNGLDAVYLYSMRFLFKMSHSRDWNHARGGRGATVFTSTSCHISHWTAQTYRGRGRANVIQSVHAKFGGKAKRMDVIHDKKPRETVGRNTVARFRMQFQAAAYAALEILSGKEIDRVYCDYHDDFVVRRTVAGVVDYHFFQVKTKGKANQQWDVAEVFSLKKTGALDTEEKLEAIRNSIAGKLFVHTVEFGDQCREITVLSNVHFNDDVHDVVTDLSAGTSSKKYIRQLIEKFAEIVSPETPLSPEQIDAARKKFSLLPNVQYIGDTLEAFSIAAHNAIWRHSEIELHQHEVERLARSLVTLVEEKSCSPISGLSKADIDLATGVGLEDLLDVLSISTQVYQTLQQGGDPAAIKVASILQRKLKEAGATESMIEAASRAKVAWDVWVRTARHTFPDLTFNVLLDEVDKKCKAWLLGGGVLGDLEDFVQATLDSPIAKKFAALDADLMFGAFCAAVVWRSTR

SEQ ID NO: 92069 - protein, 596 aa, Burkholderia sp. AU4i
MRLKSLQIESLGDVGWESPLLEFGYRTTMLFARNGSGKTPVVRALASALGFPNSFRTDILEKCNAIVLRAESEGKPLTIRRTIDATNEGFYATIDFNGEQTEHHSQGSFSLALFRLLGLTPPRLVSTTGEEAQPYIATLLPLFYLIQGYGYSAAYRAPRTFIADQFAEMVRFAFGLNPKHSYEVKKTLIEERSALEAQTRKIVAAQRVLEYQSRGVDDSDANQSVLQRTAESLTQQIDGLRASVDARGSANSTLTELLRQKDIQIRARQLELFELQNRVAGIETIRAEIDGEVETLALNEEARRVFTSFQEICRTPNCGLFLGSTESYGKNLLYLKDQIKDLERNSQRAEIRVEQLEERLQELGAERQTLVDNLEAPNTSDFDQLVTAVQALTKQLVGVQGELGRISGLKEERSKLFKLERERDRIQDRIDGLSNTGRADYEFNKLRLTLRELTVKWMQTLDTQNVSTNVDIDLNLRFTFGGETLDVIGSGGSSSTTIRLVLAIHAALLEAYLSDKSRPFRFLILDTPKQEELHTADLARYLTELEKMCEANDAQLIFSSTEYDHPTGPKDKRWLPCYRGPDKPMYLGKRSDLLSK

SEQ ID NO: 92070 - protein, 316 aa, Methyloceanibacter caenitepidi
MEQADYLVAFEFHDDVVFLEPSSKPTAADFAQVKTSSSAKPRKISSLVARKKLKDESQANSILGKMCCNFEGVCSEYDVRILLVSNVAFEFADKDVCAKDIEEKYRTKIRNKLKTEIPSLTDEQFERLHFLISGVSIDKMQTYLTGQAMELFKTHFGEEHGLNVHSWVRLIQGDIARKNNLPSDEIKTVDDLISKKCIGRSYVTDSLAVVAKAKHTIDTALVNTQLGAAGWTAADLVRLSKAFPDATYDYTDGSNAVARGIVSKLEALFEAMNNGDIELAAFCEKSLSAIGAALEHPYNKKPYLTALAILVFYEKI

SEQ ID NO: 92071 - protein, 566 aa, Methyloceanibacter caenitepidi
MILSKTEKKARKIEFSPATNLLTGENDVGKSTLIKILYNTLGADVPQLNNTRWKRAKAVCCVKFALGGKDYYIIRDEKFFGVFDANRELISRHVGLSGERGIAHFLNPLLKFRIELERKEDSKLGLAGPSFYYLPFYIDQDNGWTASWASFNGLQQFTRYRTNMLEYHLGVRPQRYYDAKRKSVEIEDELHDLGSRKDALLAVRDSYHKRKAARQVDLDPAVFRKEIEQLVDEYNAIYGRQQDVLHKLKQVRNERYGLESEISILRRAIKELEGDYAYAEDPKTPNPVGCPTCGTEIENSIVERFGILDDIDNCYALIDQRRKKLVDVQANEQTVDAAYREVRSELSSVDQLLRRQRENVTFAEFVTAEGIKEVMSSLSEDINVLSEQESDRQASLDALKDDLKVDSKHKKAINEHYQARMKEFLAALNVHVLELSDYKSYDRQIKANALGSDLPRSLLAQCMAFLHTMEKFNHFTLCPLIIDSPLQQDQDKDNAETIFRFIFSRTLPGQQLILGTVALPGVPDDAIPGDTRNIELTGKYGLLIDSDYATVSSEIGEMHEITLGSD

SEQ ID NO: 92072 - protein, 389 aa, Methyloglobulus morosus KoM1
MTLLPVGGNNDIELLEEAILNAAHYTSQSNPLASPQRETVGAKTFEKYEYQYHWALCRILGAHELSNDYVVFIELHEDVVLATSSDVTLAEFEFNQVKNVSESPWNSKKLTLRPKGSAKKEKNSILGKMLLGVRNKPFIDKLNAINLVATCGFNLPPKTEGLKLSIISIGEIHDECINDIQSAIDKEIGLYPLPKTLRFIVPDLPSTGFQDAAIGRISKLVELSAPGAKCSAQSIYRVLIDDLHRKGSVAFDYTQWSNLVKNKGMTYKDVEQVISAYTENKGIDSFSSDFNSITEEMGLKFNKKVGLRRAFERYHNAVRLERSLIAIDHQQAVKMAVENNFSVFHEHGAVSLIETALEALPENMKKNFIDLESAQAAIIYELISKCHEK

SEQ ID NO: 92073 - protein, 578 aa, Methyloglobulus morosus KoM1
MPNLVFKRLTIASDTLKSANQYNFKPRFNLITGNDNSIGKSTLAKLLFWTLGGDPSLDFTWQSFNIRTLVDFSIGNAVYQVGRYGNMMFLRRPDGDWERFQKITGEYSRAFAEIAEFGALLPNRKDVTKLETPPPAYYFLPFYVDQQRSWSQAWNSFPNLEQYARWQKTIIRYHTGYLLPEFFSIEEKIAQSTLEKKTAEAEVKKIETAIEVVKAYIPTNEKTVALTSSEFDVLSAEVNIDISKLQSKQEELLRTIAEIQTERIYLQGQLDLAKLASAELEKDYSFSVECVVGEILVCPLCGTVHDNSSPNRASILADKDEADNQVQMLSTKTSGLEKKYIQSQERLTAIRSEIDTINSKYKRDEISSEVEAEPKNDTLSFLDGLASRSVQKHVQRTMETKTALIRNINRTNSALRDDQKKLLTKKEREDMDAAFKDNLAKYINDLKAKGVNLSPIESSLDYKKLYGSGGAAESTRGILAYYMAVLLQIHAAKNEVFSAVIIDTPNQQEQADFNYEKILQFLMNTIPSDSQLILCAMNRKEIDAYKKLAFVIELDTEKILDLTKYNEFRPILNFDDSV

SEQ ID NO: 92074 - protein, 363 aa, Flavobacterium sp. AED
MAKGKIDSNSGVQANVGFDFQRNTCIYVFLEKYNSLKNQEYFIMLEHYDDIVFGFLNSTGELSEITTYQAKKSGTIWTTNSVYEIIDKITKSGIEIIKDSFPKTKDYSQSQYFITNNTISLDYKCLSENKTKKFLVNETTETVSYLNLVNDCQNVLKKGNPKITFDKNQVLHFDNLNFTFIDLGRNTKSQLELLTGKFKTVFGNKIIDHTAARDTLIFHLKKIESTYNQGDIPKLSDKHKKIESSEIEKILNILTTKKLALDFCRKRADKICDELSINVFDAMSFELDFENSLDEFKDLKQGEHQKIIRFIESKKSIFTTFTSDVLCIKELYNIFLKEHNSTLNQLQLKASISAGYFLILMQK

SEQ ID NO: 92075 - protein, 577 aa, Flavobacterium sp. AED
MKTYLNINKIFIHSEVNNKSFLAEFGKKLNVIYGANTAGKSTLIQLILFTFGINDNKTKLIKILSENIFTRLDITIKKNNENIEYTFVRKDETLFIKDSKTNKVTTYNGIGGNSSVEHYKLKEFFNSLLNFDLLLETKNGISKAPIETIFLPYYVSQDVGWVYLRKSFSNLDFYKNFKEDFLDYYLGITKLEDKEKRKALEIQLADKNQKYNFYLNFEKNDTVIESSKLLDDSFKGKGQEFINELTNRKASLLELENKYVKQSNQLTYNSQRLSVISKVSRNHNHQFPGKDNCPICQQILPIDTKQIYEYYQEENDTIKIKEKIQSENKKIQSELNSTNKKIEELRSLLAKDYHKHIVYSDKNITLDEWIKTQANIKLDTSINENIGKLAKEINDLKEELQSFKDDDDIQSERFIKNKKFKEFYNINNIKLDVPKTEDSRFNYVYELSSFPFQGVELHLAVLSYHFAFNKVINETENIHRLPLILDSIFKEDLDGNNKEKILDFICKNRPNDTQTIISVADNKSKDTKIEFFKEKFFKTDTNLICIGNSIDKESILKEHDKSLNEILNDTFEIMEYL

SEQ ID NO: 92076 - protein, 392 aa, Alcanivorax sp. 97CO-5
MAGKNSGGTKLHEIEPRENAGRETIARYQAQFRGAAFECLSLLEGEALDRVYCDYQDDFVSRLNVSGNYVYNFFQVKTKGKLNYQWSVNDVLGIRKGAKTCEPFKITESYLGRLLIHTIRFEKSCGNVVFLTNVHLNDDLEGLRDAIQGCGDNSYYKLLIESFNEALTPEAPIEDQKIIDRIKKLQIKSNIPYLNPHDDRFFSEARETIYQYSEIDLQRSECEEILNSLISLVERKSFGKLLEEIGEEELDDIAGISLSEMLDILSISKAAYQSLRDSGDSQAIKNASIIHRLMSKAGASERMIEFVSDCKVRWDIWFRDKRHTIPDFDLNIILEEIESNAAEWVRSGEKLPILRNRIDNVLSSLDDDNLSSTLNRELLLGAVFSFLVRGAA

SEQ ID NO: 92077 - protein, 593 aa, Alcanivorax sp. 97CO-5
MKLVELKIYPSGRDGWGSKDLVFASDITQLYGPNGAGKTPVIHSIAYALGYPVRYRDDIMAKCSSVRLTVEHEGSLLTFDRSFSNSFHIEVSEQSSNEKHIFYKEYEVSEYLFLRLGLSPIALTSNKNEPAYPYISTFLPLFYIDQDAGYTSAYKPPSSFIKDQYAEMIRLGIGIAPKHSFEAKRLLIEKKKDLDLINIKIVNTEGFIQKLEEESGVDSVSVAELEDELERLRCELEELRNSFDATNDADYILKRLIRDKKNERLNLSASIKDIESRISGFNKIKGEIEIEINTLSLNEESRRLFSSFKEVCASPGCGLFISSSDSYGKNLLYLRDQIKDLDRNSGFQKIRVEEYSSRLRKIDEEIASLESNFTKEGNDSQTASLISAISSLTRSIIDRQHKKEVMGRIESEKKCYVQLLNRRRGLQGDISSFEGGARSSDIRIFEFKNAYRKKIIEWLDVLSTKNVSRNIAVDADFNVIFGREKLSQFSGSTLLRTVLALRAAFFELFISMGCASIEFLIFDTPRQHDIETKDFAAFITRLKKICKDNRAQIVFSTTEYHYNAAEGDIEWKPEFPGFEQPMYLGVIGGAWPE

SEQ ID NO: 92078 - protein, 269 aa, Vibrio sp. JCM 19053
MGQGINGGVEAGRGFSFQKCAALCLLLDDFPSFGKRKYFLAFEHHDDFLFAFYDGNDELDEVKAYQAKKKSLSSSWGTNDKLAEILCKLTMTGQRISQDNSINKSKNYSHRLSFISNAEIKLTNGKAGKKKKSISVKEDTTPIRFLTLDKEIQIKLEDIINSNAEPNDISEMNGLEFANISLNHNHKVNKDYLVGKMTSMFGDKISDYVAALDVLMTLFTDSELEFNKNGLPELSHSAKWVAKSQIENAMDVLTSQKKLIIFGESMLKC

SEQ ID NO: 92079 - protein, 218 aa, Vibrio sp. JCM 19053
MRNSVLRKVHSAQNKQRPKLDSCPVCEQSLPSTVEALYKYNQELNDTVHQRSVVDEKLKSVQSTINSVEKKLSEGRRELVGKYKVLQKLKMLNITFDTWMEYESIRRLSEELDLKLNKVQRKLDLVLGELKGIDQSDIERERNIVSRLFLQKFKSNAKALQATIPMSPRYRDVYEINSFPAQGVELHKLIMAYHFSFWELLKDNEKNAQATFCFRCSL

SEQ ID NO: 92080 - protein, 357 aa, Klebsiella quasipneumoniae subsp. quasipneumoniae
MNLADALIHVPQDERGGEIAIRGFEYQRCWAIDELLNRHKKNESYVFIPEYHDDVLILNSSESPTMATFAQVKTRDTHWTITPLIKSDGEGKLSFISKLFKHKYDFSSYKTDLTFITNAVFKFFDKYEFNADELKASEKDKILDAVKTQLPGFGSPDLSSLKFKTSNLSLLDYDAHLLGKTVEYLEDTKSSEVINAMAFKRTLVDLFEKKTRVSSREIKSFKELIDKKGISNELIAKLISEIKSLKTSFPDWEKISILLSVLHKDEFETLMLKIKYELFLVNVKDINSIEYDFYRLLKQKRINEKFNAENIPIHIEEMISYALEESDEFRQLIDDDYKYIMACCAVIEKMSGNEAKK

SEQ ID NO: 92081 - protein, 554 aa, Klebsiella quasipneumoniae subsp. quasipneumoniae; identical to SEQ ID NO: 91139

SEQ ID NO: 92082 - protein, 375 aa, Zhongshania aliphaticivorans
MSSDILKSFAETPVRETSGSMSSNRFDYQKNWSLCELLELHANQDDYLMVFEHHEDVVVFDSQSDPSGVIFYQVKSKKSGNWTVGALTTSKKESPSIIEKLYENYKRFSDIAEVSLIFSSNQPLSAKLRNGDKSIDLGRVSFSCLSDKEKEKIRSAVEPSSQEYCNLHGLSTIETQKSDLRLSDHTSIAKGKLVEFFENLHPESQVHISLVYKTFFDEIRRKTNHEREIGNDSELLRHKAIGRSDFERMIGTVLNRRNDDDLWNDASNVLSTENFHFQQIRRIRQCWQEYIVAKMDSTNEFHAQFSYDVICEISSHDGEDGIKTFGDLAEKIIPALSKKYKNEYDEEYVRSAILYEALRNEPISKTDTKLTEEEK

SEQ ID NO: 92083 - protein, 565 aa, Zhongshania aliphaticivorans
MKNLQLKSMLLVSHREKKARKIEFDPDITVVQGENDTGKSSVIKSIPYAFGANPHKRHPKWTNADILILIRFSLDGKDYSIYRHRNSFSLFDSDDLEIGTYSSITNELAPELAKLFDFNLKLSDREGVPITPPPAYLMLPFYIDQDKGWVENWSSFTNLSQFSHWKQRVTGYHFGLRPDKWYELEAKRKNLENDKEEPLRQIKSIQSVKDKAYKDVSRVDFNIDAEQFRCEINQLLDRCEILKGNENSYRQKISEYKTEKIRLEAQIEIVVRTHDELSEDYKFSTQLNDETIGCPTCGANYSNSFSERFDIAQDTETCSDLLASLRDDLRDIEKKIDDTESLFAQTKETREQINSLLSQKKGEVKLKDLIDLEGKKALITHLENEEGEYRAVVTDYDERIQSTTDEMKKYDDPERRKAILSQYEENLRRNTSKLGVHSLSDNVFTNINASIEESGSDLPRAILAYFFTALSAIEKNGNATFFPIIIDAPNQQEQDPKNLQRILEFVRDNRPQGRQLIIGLVEDANIDFGGKVLLFDKKYSVLNEDDYGPVSNEIRQFEAANLAVE

SEQ ID NO: 92084 - protein, 359 aa, Burkholderia stagnalis
MLQAKLNDSITKERGGRHGGKGHEFQRYWALCYILQLDLEKDDWVVLLEFIEDIAVLDSESAPSCIDLFQLKKKEGTSTKWTQTALSKKPKEGKSILAKLFESRNVIRDNTRSIAFVSNAPVELELSSDDSSIEKTEFSGSELSPAVQSLLQTTIAAELGCDKKLVDFAALTFVRSPLAMDDLESHAIGRVSKYLATKFPDHGARADVFCKALYSEIKVKATETQESSSYGDLTKLRGISKAQFAGMLHLTLSRKSDADVVDEIITGLTSEKVPFITRSAIKASAQRFLIDKAGRSSTLTEQLVDAVEPYKTGYPVGLETMWEIANWIADQVSTIPPFKESGVFDRNYLLAVVLYGLNR

SEQ ID NO: 92085 - protein, 582 aa, Burkholderia stagnalis
MKSLRFRKLWLVSETERSAYRVNFDSNKTLLVGKNHTGKSTLVKHIFRTLGCDTRGKSDRWDSLALSALQFSLDDQSYTAYRRMNVYALRDDASQSVRATTSYREWSAILADLFDFRLMLPTHQDSLAQATPPYLFLPFYMDQDSSWIQQWSSFDKLSQFSSWKKPLVAYITGQRPNGYYDAKFHESRAKDAAAKTRNELDVMHTALARVKKSLPRPVVRIDTNAFRKEIADLIHKSTLLKSEQESSRKRVFEFAAQKQALGSQITAARNALRDLEGDLKYLTESEARPTLTCPTCGSIHENGFPVRLELIEDASTLRTVIAELEMDLRGVERRLSENEGNLNRLRRTAQEIESTLKMKKGALRLQDIVNSQSVHVVQGAFQKDMDTLNRDLLKQESDATSFKEKVARFDVPDRTKAINEFYSERIQLFASELEVQDLREDVKKKPEASISATGSALPRSLLAYQFAVLHTAKESGNGHRFPVVVDSPNQQGQDNEHLMQMLRFIERRTPADQQLILAVEEMPLSFQFAGEIVRLEKPFALLDPDRYESVREELSVLVASVQKAIDKRVATTKDDSNTEDSA

SEQ ID NO: 92086 - protein, 376 aa, Burkholderia stagnalis
MASSATIVELCQVENDDDLHEFGGGHGNKGNDFARFWLISELIALTEVGTSDYLFILEYVQDVARIDDPAAPAAITLYQLKKKEGSVWDLNSLAGLTEKGKQVKPASPLAKIVKSVLGFKMLSASAEFISNARFNVKLAAGGTALQMDYLSLADLQVERQSNFRDSAAAAHSVPAATIPLQKIGLRYAPIEVNDMRVHVIGVAHGFLKKLSIAHAAQADSFVDALFAKLATASRNTSKCQTWEELVSKRGYSKKQFNDALAALQLLPDQQGRRETLLKELASALEWHTRDQMRIEVALTELARLKVTGGELSIANVDWAALRAVSATAEAESWSTAKEFEAVESCLKGFLPDESVARIRALAIYGMVQAWTSQTFA

SEQ ID NO: 92087 - protein, 97 aa, Burkholderia stagnalis
MKSTESFLPSPIVIDSPNQNAQDRKHLERVMGLLASKTPANAQVILCAEDPSDSFNPDKVIQLERERALLESDQMDEVSARVLPLIERAITELSRAG

SEQ ID NO: 92088 - protein, 381 aa, Burkholderia territorii
MRDLASDEKTGVNASLGFTYQHWYAALLAIERFGVMDDYLIILEFKEDVAIVDSSEQPSRAEFHQVKKNEQHGIWTLRDLLATSTTKSGAKTMSTMAKLVMRRHCFHPHPTALWFASNVGFKLPLEEDETPRMTHHANLLDLCDSELATLRAALAKELDVDEDSIVLDDFRLIRTGLPLDEPHRFVAGTLDELAEKKKLPFQMKRPVLGARMVANEFAQVGSKNSYAKTFTQLKKRGVSRSQVAEILVQVENFKQDSSHDVLKDCFARLDAEVHDYEILEDVKSELVRVCADLTDRTNIELRAICIALAKARDAFKQAQKRFRLLGEQMEAIVYDAEKASPELCGSYTLGYLHCLALLIIKNATDILIFTAAPGAQQEVKK

SEQ ID NO: 92089 - protein, 578 aa, Burkholderia territorii
MTRLVTFKKLWLASERDKRGRELSFGKRTLLLGPNHTGKSRICKSLYWSLGCEPQSLVSGNWDPATVGLLEFSFADETYFALRKGRAMGLFSSQKRLLFATDRNSEWVERTAKLFGFHLRLPRPGGAAYGQAGLDYMSLPFYVDQDGSWGADWTTYDNLGQFSRWKEPVFATVTGSRPSAYLIAKQKKDEIDRRFRTKEADLAAQKEAFLRVRESLPKATPSLDISAFRAELVELAKAAQAAQAEQMKARERLIVVTGERQSLESKLKLATAAQRDLGGDFEYLSAVPDDTQIECPTCGVLHTTSFHARLSLGQDLEEMNELVAQLSDNLDACRLKESELRQTLRNIERHVEKYEQALSAGRSRTRLDEVLSAHSKRTLDEAFSKVESTLGIEVAALRKEQAAAEDAVKRYDDKHRKADVSKFYSAELRRLSDLLNIPTSERIEDTGIGKRPKAGGSSGRRAILAVHLALIACNFEKGDLPLLPVIIDTLQQSGQDDPNLGRMFNIAADHIGERQQLFIAMERLPAEATVDRFDVQMFETQQGLLRSDEFNTVALMIRPMLDDVRERIQQQVSAKRDS

SEQ ID NO: 92090 - protein, 381 aa, Burkholderia territorii; identical to SEQ ID NO: 92088

SEQ ID NO: 92091 - protein, 578 aa, Burkholderia territorii; identical to SEQ ID NO: 92089

SEQ ID NO: 92092 - protein, 366 aa, Burkholderia territorii
MQFQAAAYAALEILSGKEIDRVYCDYHDDFVVRRTVAGVVDYHFFQVKTKGKANQQWDIAEVFSLKKTGALDTEEKLEAIRNSIAGKLFVHTVEFGDQCREITVLSNVHFNDDVHDVVTDLSAGTSSKKYIRHLIEKFAEIVSPETPLSSEQIDAARKKLSLLPNVQYIGDTLEAFSIAAHNAIWRHSEIELHQHEVERLARSLVTLVEEKSCSPISGLSKADIDLATGVGLEDLLDVLSISTQVYQTLQQGGDPAAIKVASILQRKLKEAGATESMIEAASRAKVAWDVWVRTARHTFPDLTFNVLLDEVDKKCKAWLLGGGVLGDLENFVQATLDSPIAKKFAALDTDLVFGAFCAAVVRRATR

SEQ ID NO: 92093 - protein, 600 aa, Burkholderia territorii
MRLKSLQIESLGDVGWESPLLEFGYRTTMLFARNGSGKTPVVRALASALGFPNNFRTDILEKCNAVVLRAESEGKPLTIRRTIDATNEGFYAAIDFDGEQTEHYSQGSFSLALFRLLGLKPPRLVSTKGEEAQPYIATLLPLFYLIQGYGYSAAYRAPSTFIADQFAEMVRFAFGLNPKHSYEVKKTLIEERSALEAQTRKIVAAQRVLEYQSRGVDDSDANQAVLQRTAENLTQQIDGLRASVDARGIANSTLTELLRQKDIQIRARQLELFELQNRVAGIETIRAEIDGEVKTLGLNEEARRVFTSFQEICRTPNCGLFLGSTESYGKNLLYLKDQIKDLERNSQRAEIRVEQLEERLKELGAERQTLVDNLEAPNTSDVDHLVTAVQALTKQLVGVQGELGRISGLKEERSKLFKLERERDRIQDRIDGLSNTGRADNEFNKLRLTLRELTVKWMQTLETQNVSTNVDIDLNLRFTFGGETLDVIGSGGSSSTTIRLVLAIHAALLEAYLSDKTRPFRFIILDTPKQEELHTADLARYLTELEKMCEANDAQLIFSSTEYDHPTGPKDNRWLPSYRGPDKPMYLGKPGDLLADDELT

SEQ ID NO: 92094 - protein, 361 aa, Halomonas sp. KO116
MSDTKNDTNSGVEALTGFSFQRNSAIFLVLENYDLLVGSEFFICIEHHDDVIFAEFNNSNEISKIKAYQAKKSSSEWMLGKKLAEILAKMTKVGSDLADDEMSKNTGYSQDLIFLTNKSIRLNCGSRKKEQKFSEIVKENNVFVCYTNLHGNIQNNILTKLDGFSFEVQQLENVYFKYIDVANTDKSQRNQLSGMLSDLFQDKISDPNAALNLLLKLFREVETVYNQGNKSKLLDISKRVYSKDIFKAIDVICSKAKAFKLWRENAKELSEFLQIPISRSSNYTEYLNDCFDYFKDLKQVEFQKIYHFVDDNRDVDESSYSHADCIKKISERFTRDHQTQLNKVLVSFAIVAAYVETRNAI

SEQ ID NO: 92095 - protein, 583 aa, Halomonas sp. KO116
MLVKFKSLLVFSEEGKKCFYTDFSDGINIVKGKNTSGKSTLIQSIIYSLGINDGNDKLQEILDEQLIFRLDLERTFNGSISTITLIRDSQSFFIYEAGKSAFRFDGINSDNASEHIKLKEKISSIFGFNLALESKEELKEAPLEVMLLPYYISQSVGWVYLRESFSGLNFYKNFKFYYLDYYLGITSDIDRILLHKFLRKKAEIVREIEFLEQMKNNDENLQLSQLLDEEFRGEAVKYLEEYSELRESLIKEETRHIHLCNKKSLSLNRKIILNRIKRNISHQRPEIDACPVCSQILPNSLEAVYIHQQDINDTESEVYTVKAEIADLQAKINSTFKKLKKISDIVERKYSVIKNYQSSSSTVTFDTWLDHKSNMKLIGNINYSLSEKAIELKGILNDIDSFGIDQNVESIRHTKEQIFLTYFQRCLSDLNLSNFDEARYKQLYKINSFPCQGVELHKTVIAYHFSLNKLIANTQGIHRFPFILDAVMKEDIDEENRRIIFKFLNDHAPSDTQMIFSVSESLSHSKDDDRTTNNIELVNKNYFSGKGKIIQIGNGDSERSFLNKYGGEYEELIQKTLRMINIS

SEQ ID NO: 92096 - protein, 363 aa, Flavobacterium sp. KMS
MIDKTINSGPDAHNGFALQRNTAIYLLLDNYINKFQDKNYFICLEHHDDFLFCFLNEKEEVDLIEAYQSKKKSPSIWRANPELFEILNKLLKTGKKLILDKISKSEQYKHILYFSTNQTIEIKKKYPKKANKPDISISIKNDNPNIQFGNLHTDIQEHFKASITETNLHDQLDKLNFLWIPFTTTAKEQENQLEGKISEVFGNKIFDKRAAIDSLISLFRKIEGIYNHGNEVQLLDKTKRVESDKIENALKVLTTKSKCFDYWHLRKTEISLKLRIKPIEKEIFELAFDSAFDLFKSIQEAEHQKILQFTKEQIGNVTTYSEEENVIELFDIFQSTCTTNFNELQIKAILFASLFEVLYIKEK

SEQ ID NO: 92097 - protein, 572 aa, Flavobacterium sp. KMS
MRTQLIYKNFFIYCEKNNTSFFTEFDEGINIIHGKNTSGKSTVIQAIQYTFGINDEKHKLFEILDEGVIFRLDFVLKKGNDENLTIIRDNEFIYIKRENLPLIKYSGIGANNSREHILLKEYLSKLIGFNLNLESSGEYKLASLEAMFLPYYVSQDYGWVLALKSFRGLDFFRNFKVDYYDYYLGITNEFDRLKKQELEKDKKNFEARIKFLTDTEKYDDDFKLSKLKDESFVAKSVEYIESYKKNKDELIQIEKEYLTKCNKLTFIEERLKILKVVKKALKTENPVENDCPTCRQNLPSSIEDIYKYYQDFNNTESEIAKLKNEIKEIKGAINSLETAMSAKKEIVSTDYSILHEYKIADLTFTSWLDNKTKIQLSNNILSQIGETTIELNKKNKELEAFKTDDELRKERNNKDYIFKGYFKDFLNELNVKSFDNELYLLLYQMKIFPKQGVELLKTLLAYYFAFNKLIEKTEYVHIFPFMMDAVFKEDIDEDNRKLILEFIYKNKPSNNQLIFSFAESEKNAKTASEYNKEIMNDEANLILTNLTNERSLLNTLNDKQKEYLQETLFLIE

SEQ ID NO: 92098 - protein, 362 aa, Roseivirga sp. D-25
MAKQITNSVNSGVQANVGMDFQIHCTIFLFLENFKSLHGQRYFITIEHLEDIVFGYLDSNEELTKVETYQAKKATSAWKISDLYEILQKITEASQSILDDSHPKANGFFQENYFATNNTIDLKTKVKTTSYREIINEANSNVHYPSLDQNIKTKIEQGNSTISFTTDNLKNLATLNFKYIDLSRTSKSQKELLHGKFQTVFKDKITDHMAALDTFILCLDKLDSTFNQGNTANLSDLSKRVESHEIEKLLALLTTKKLAYDFWRDKSDELCKELKISLLDRSSFELNYQNSFDLFKDLNSREHQKVFKFLKSNISILGNHTSDIDCISEFIKEFNKKKSTTLSSTQLKATISAAYIEIKNTL

SEQ ID NO: 92099 - protein, 576 aa, Roseivirga sp. D-25
MLNLKINSVLVYSELSDKYFFTEFGENLNIIYGKNTAGKSTLIQLVLYAFGINDNKLKLTEILSEEIFVRLDCTLRKDGISQNYVFVRQDETLIIRDNNEKTIKFNGIGSDQSAEHIKLKKFFNDLFDFNLMLESTSGISEAPMETIFLPYYVSQDVGWVYLRKSFSNLNFYKNFKEDFLDYYLGIENSEDRKEKREIETLIKSLQQQISFFNKIETDNEELEVSQIIEDSFSGKSNEFIDNFSSNKSKLLELENKQIKESNNLAFLNQRLSVVSKVNRNHKNQKPGTDSCPTCSQTLPKSIEDMYEYFQEENDTSKIQSELKEKIKKSQASINSINKKISSLKEELESETRIYNKYSVDNLTFESWINNKANIQLNNNITSQVGRLSLTLEEQKEKLSEFKTDSEILSERSKKSKIFKDYYKSNNAFLGLPELKESRFNDLYDISSFPFQGVQLHLAVLSYHFAFNRLLTDSSGIHRIPFILDSIFKEDIEQGTKNKILKFINSHHPKDTQTILSIADDKNVDSKIETYSSEFFNKEAKMICIGEGVREKSLLIDNDGEQKTLIENSFELLENEN

SEQ ID NO: 92100 - protein, 369 aa, Burkholderia sp. MSMB617WGS
MRDPKPRLTRTAAASSGTPASNPLYVSQREKAGAATFDRFNFQYDWALYEFLEQHKLNQVSIVFVEFHEDVVFSSSLDAADARFVFCQVKAGASANFNKKSLVKRIKQKPSVLGKMFTSVGDKKIAARVDKVRLVATGGFKLELAEKGFQLEEIPWDALHQETANEISAALAAELGTDCELEKLHFHKPQLPELQHRRAVIGLIADLISERVPNGGGDCQAIYHVLQDELRRKGVHTWDYSDWESLVRNKGLTGQRVDALFEQFASSATVDDLLSDFEYATAQLQYEPRERRKLRQSARTYVLNTLDGGSLAHLQVRAAVSKHLQADFPLRLTTDLLTSLVAASPDVVREHLVDETSLVAAYIIEYLRA

SEQ ID NO: 92101 - protein, 567 aa, Burkholderia sp. MSMB617WGS
MSALIFKQLFVQSTSQKLAGRFRFEPGLNLITGDDNSIGKSTLVRLPLWTLGCDFDFDTLWTPFDARTILEFEVDGRTYLAARHRNQIRLKVGEAPWTVYHSTSDAYEQAFASIVQFGAVLPRRKEKWIHEVPPPACYFSAFYVDQRRGWTEPWGSFVIHKYEDWRRPVINFHVGYHPASYFEVGAEIAKGLQHIDADEGLIEKYGRAVEVLTLLAPPEELPTTDAELDSAIADIQNSMVAVKRREQRALSVLRAKHEELEITKVQRGIAQAAVDDIEKDYDFASTQLRDDVLVCPLCGTLHDNTLLERASLLQDRAQAEQQVALLTATQSKIEATIETTLRRLDAVREELAKLNRRFKRLDKDVTVKSILETMGTDSVRRRAEEVTTTARLRLRANRKTLAEQRAAQSELIEDGKEESINAYYQSELAGLCDTLRLSPAFDVRTALPTGYRELAVSGGGADSSRMQLAYHLTMHRLIRHFKTEVLAPLILDTPNQQDQGALNYGLVSEELKRRATKDTQLFVCATRHAAMQTLEKDSTVIQLDENRLLSAESYERLQAGFLRVFGE

SEQ ID NO: 92102 - protein, 386 aa, Burkholderia sp. MSMB1072
MKTIEVVAPGEDVGRETLSRFDMQFQAAAFAALEILEGNGVECVYCDYHDDFVVRRVVGGRTTFHFFQVKTKKKANHQWSLLEIFAFKKIKQGVDAESLRKIKDSFAGKLLTHGIVFDDACAEVTLLSNVHFTDDVITVVDECRGKLPKSKCATFLSKHFDAIFAIDAGDDAAKADEVLSKLSLRPAVAYIDHDRDVFASAARTAIYNYSEVDLTYQETNEIANSLLDLVFKKSKASLEGVRPHDLADQVGVALDDLLEVLSISRAVYDALRAGEDKKALKTASILQRWLKTSGATDDMIEFASRCKVNWDLWHRRARHIYTPFDLTFLMDKINALYAQWMKGSGDFSTLYTLLNDLIADPICEKFEAMDRELLLGAVCSVGVKQR

SEQ ID NO: 92103 - protein, 587 aa, Burkholderia sp. MSMB1072
MQLTTIKILPRGANGWESATLKFGNPLTSLFAPNGSGKTPIVQAIAFCLGFKTKFRDDICEHCEAAVLTFRHDDIEVTVRRDIQSEFHAILETGGQAFEFFDEGGFSRQLFSTLGMPIPDLVGTNKQRTQPYVSTLLPVFYVRQDGGYNEPYRAPDSFIQNQFVEMVRFAFGLNQRHSYDAKRDLLEAREQLEAVQRRIVHQQKLVANLSADRDDSTEAYEALVARAATLTEQIDHLRESVDAQGAAAEALTELLQVKEEQLRKLRREHGELRARLAGIESIRAEIEGEIRTLSLNEESKRAFETFFDICGNSECGLFSTSKESYGKNLLYLKDQIKDIEANTNRAETQIAVLEARIADQDSERKAILSKLKEPEQRTPTSQIVLAAQALTRQLLDAEQQRATLDQIKDERWKQVRLDEERSRLLDRIDTLSGSGQSDLGFNRLRLRIRELTVKWMDILHTPNASRDVDIDLDFRFRFGGEPVDIIGGSTKSRLILAIHAAIFEHYLADTTRPFRFLILDTPKQQELDSEDLKRYLDELDVVCREHRGQVLISASEYRHSLRDGDREWLPEFVGEVQKMYLGSLGRN

SEQ ID NO: 92104 - protein, 355 aa, Bacillus paralicheniformis
MNLNSYPSLENYKARENTGSRSSNRLAMQISFAMWKIFELYRTEDFTVAMDCIDDVVIFKTSNKNRTIVTYQLKTKDSTTGNFELKKLINDNVFLKMYDHIEKIDTDVEEIYLITNNPLKFKKKMVHAERILFDDLDTDIKELIEENMSGSPVFAEKGLSTKFIYSLIDMSFHNHREISQNRLNSLLMEEGIDISITAADALFNALQDILTKKQNYEFSLQDKFNTILNKKSFSKTEFASLLDSSKKINADVLSFEDIDNKYKDRSLSLKEESLYRRAMASVKEKLNKSPNILQNINTDIYQFVKEQIDTNEGLKRSELVMLLQSIFDDKVNLELSKEEKEILYMQNIELVLREG

SEQ ID NO: 92105 - protein, 363 aa, Bacillus paralicheniformis
MNKVIINKLFIFDVIDKKSKSVDFKDGINIITSKGNQLGKSTIMKSIYYTLGAEVFFADRLNVKSKIHILEIKVNDKKINFIRHGKVVVIQDDKRIFKASSASDLSHKLHDIFGFSVFIEDRQKNYVTAPPVFRYIPYYIDQDHGWTSELKSFDKLGQFDKKSRDLLFYYHLNILDENYGIKLKEKKELDVLISGLKTKNKEILGLLAYIRENITAFNSEMDITALQVQKKEILHKYKKYSYDLNNIRRKLIEYQEEIYKIDNVIDNLNSTLKKNDKVRAHVKHQFDIECPYCKEHFEIHANDILKINYNIVDLEASKLEMLDIKVKLQEKIKEVQKEYEVYQATLKTIEEKKLIQKIPLKTY

SEQ ID NO: 92106 - protein, 355 aa, Bacillus paralicheniformis; identical to SEQ ID NO: 92104

SEQ ID NO: 92107 - protein, 564 aa, Bacillus paralicheniformis
MNKVIINKLFIFDVIDKKSKSVDFKDGINIITSKGNQLGKSTIMKSIYYTLGAEVFFADRLNVKSKIHILEIKVNDKKINFIRHGKVVVIQDDKRIFKASSASDLSHKLHDIFGFSVFIEDRQKNYVTAPPVFRYIPYYIDQDHGWTSELKSFDKLGQFDKKSRDLLFYYHLNILDENYGIKLKEKKELDVLISGLKTKNKEILGLLAYIRENITAFNSEMDITALQVQKKEILHKYKKYSYDLNNIRRKLIEYQEEIYKIDNVIDNLNSTLKKNDKVRAHVKHQFDIECPYCKEHFEIHANDILKINYNIVDLEASKLEMLDIKVKLQEKIKEVQKEYEVYQATLKTIEEKKVDSENTLEDILKFKGLQETQKQLNTELVKNVSEIEEESKNLKEIKRDLKKWDDEIDRANNSYRDILNLNLIRFNTKEHSLPEKYNIGKNLKASGSGQVRVNLARVYSFIKLLEDYNPDGLKYPLVIDSPKGGEQSMTNSELILRLLTEKAQISNQIILATIEFESFYNGDIKKFNIITLDNEPYNLLSAEDYQANQVIIDDFVSLYFEANK

SEQ ID NO: 92108 - protein, 356 aa, Bacillus sp. TH007
MNINSYPSLKNYKARENTGSRSSNRLAMQISFAMWKIFELYRIEDFTVAMDCIDDVVIFKTSNKYRTIVTYQLKTKDSTTGNFELKKLINDNVFLKMYDHIEKIDKDVEEIYLITNNPLKFKKKMVHAERILFDDLDTDIKELIKENMSGSPVFADKGLSTKFIYSLIDMSFHNHREISQNRLNSLLMEEGIDISITAADALFNTLQDILTNKQNYEFSLQDKFNTVLNKKSFSKMEFASLLESSKKINADVLSFEDIVNKYYKDRSLSLKEESLYRRAMASVKEKLNKSPNILQNINADMYRFVKEQIDTNEGLMRSELVILLQSIFDDKVNHELSKEEREILYMQNIETVLREG

SEQ ID NO: 92109 - protein, 564 aa, Bacillus sp. TH007
MNKVLINKLFIFDIIDKKSKSVTFKDGINIITSKGNQLGKSTIMKSIYYTLGADVFFADRLNLKNKIHILEIKVNDKKINFVRHGKIVVIQDDKKIFKSSSATDLSNKLHDIFGFSVFIEDKQKNYVIAPPVFRYIPYYIDQDHGWTSELKSFDKLGQFDKKSRDLLFYYHLNILDENYGITLKEKKELDFLISGLKTKNKEILGLLAYIRENITAFNSEMDITALQVQKKEILHKYKKYSYDLNNIRRKLIEYQEEIYKIDNVIDNLSSTLKKNDKVRAHVKHQFDIECPYCKEHFEIQANDILKINYNIVDLEASKIEMLDIKVKLQEKIKEVQKEYEVYQATLKTIEEKKVDSENTLEDILKFKGLQETQKQLNTQLVKNVSEIEEESKNLKKIKRDLKKWDDEIGKANNSYRDILNLNLMRFNTNEHTLPEKFNIGKNLKASGSGQVRVNLARVYSFIKLLEDYNPDGLKYPLVIDSPKGGEQSISNSELILTLLTEKAQISNQIILATIDFESFYNGDTKKFNIITLNNEPYNLLSAEDYQTNQVIIDDFVSLYFEACR

SEQ ID NO: 92110 - protein, 369 aa, Citrobacter sp. MGH105; identical to SEQ ID NO: 91950

SEQ ID NO: 92111 - protein, 587 aa, Citrobacter sp. MGH105
MKTIIKFDRLFVVSESHNLYFDQKFSNKINIISGCNTSGKSTLIQSILFTFGINDVKDGLSEIIRYNPTFRLDFSITKGGVDKKYIIVRELGSIYLKEDGGNVFSFHGIDSDGRVEHVKLKEMLSQLFDFNMLLEQKGELKKASIECMFLPYYISQSVGWVYLRESFSNLGFYKDFKDTYLDYYLGIENSFDKEYFYKLTKERAQLQSKISSLNKYSAEPHFVVSKLLDEEFGDEAQKYIDGYIKLVASLDEERDVYTGLCNKLSLTKNHVKILRRTKRNIKNQNYNNIDRCPACTQILPYSLEGLYGYYQNINDTDKLSEQINNKIQKIQSDINSSLAKIKKLEIDISSKYSYFLEKKSQNLSVNTWIDNKANIRLLGNIHEEIEEYTKRSDEIKGLIDGMGEEQSLFVERFNKEKDFKEIFKKYLNDMQLFNVTEPRYTELYKINSFPFQGVELHKTVMSYHFALNSLIRKTDNIHRLPFMLDAILKEDIDDRNFDLILSFVGKNLPTDTQSFISMSEYAEDNLLKDGKEISAFRRAKVKDIKNRYFPDGTNLFFIGDGKHERTLLSKPLDLNLDIFVDTCRLTE

SEQ ID NO: 92112 - protein, 352 aa, Enterococcus sp. RIT-PI-f
MVIDDAYSLYEADVSGSRSKNRFSYEIYWGIDRFLRELMNSDDFTMVFDYVCDVEIHHRDRLEFFQVKSKKDAGSYTVRALTKKEPLKQHSIIGTLYKLRHTEIENNMPKSKLAIVSNLHLGVPDNLRIPNSELTLETIEEKNRSIFLSTISAEFPDEEIDLSDVFFINSDLGISTVRETMVGRVESFFVQLYSEYPVKPGALLTLLIQEALEKANYEFPVNSRIEAVKKKGFTSERFKLILGRYAEQSVSIMEQCKKYIQEAENNLGKRLKYMTVLPDVISRLKMDFHWQELEGKIRDDIFEQSDKLESAQIFELVRQYIVISSVTFPLEFSLEEIELLCLIVMIKVEESL

SEQ ID NO: 92113 - protein, 564 aa, Enterococcus sp. RIT-PI-f
MSKKLIVNNVYLFSTATQKAKKVSFTSGINIVTSDQEDGNKKGKSLILKSVYYALGADVYFDDNLKKDTVTFVVDFTIDDTRYTILRLGRFFKLFDAEHNLLVGTDKRDELSEVLYPLFGFSVYLPSRKENDNKLIIAPPAFAYMLSFTDQDHMDGSKLGSFTGLGQFINFKEPLLYTHFGLFNKDYFDLKLKQDNLNEKLKLSEQELTTIANMLKKIEQEIPEAIPEDVESLRKELDRQESEYRAIYSDLQKTKNELSDLRSNYVKITKTLEDVSIRKRHEEKDVKQVLHEHICPLCRQDLEDTLDVRIIKNINIEDLSQVSLELQSFISSAKRKIEEKESVYKVHLKRLNKYNKILKGTKESQNEILKIQGYSDLKTKLEGEWSDENSNHKELVAEAKVLTKKLKEYSKKKKGVNSFYFKSMKQDIIKFGLEEVHDKSIENIKNSVKATGSNQPIVTVIWYMNLLKLKNEFFPEAIKFPLVMDSPNHAELDDQKKETLFEYIFANIPLDTQCIISTLGFNREDYDTDLDLNLIILENEKYQLMNTDDYQDNKDYLNKLIDKQ

SEQ ID NO: 92114 - protein, 358 aa, Pseudomonadaceae bacterium E5571
MVNSNSGVEGGSGYSFQRCCVVFLLFEDYEKLNIEDYFICLEHHEDFLFAFLDENRHLKQIDTYQAKKSRDDWKTDSDLCEIIGKMTMVGKELVNDPHDKSNNYQHTLNFLTNRNILLTSKQEKGAKQDKVKIQVSNRRKNYSDLTEKIKKNIEPRICQSILEITQLKNVYFQYIDLAQSYKSWQRELKGLSMEHFGQEVNDHEAVISTLMRLLEEAEQTYNDNNKVLLSDLSKRVTKDKISETFNMFTVSKKSFDFWRKYSDQISTQLELKLPIRRRAQELLENCFDFFKDLQQVEYRKIYKFVETRTDIDENHICEADCIVDLYHCYQREFQPRLENYMVAFAVIAAYVETRGMYV

SEQ ID NO: 92115 - protein, 581 aa, Pseudomonadaceae bacterium E5571
MSKLNLKSLLVYSPNDEKGFYTEFSESVNIIHGRNTSGKSTLIQSIIYAIGINDSKDNLNDINSGDVFFRLDCVLEKAGESCNLVFIRSDDTLVLQKGNEPAIRFDGINSNNSFEYGRYKELLSKLIGFNLVLQKQSELVSAPLEAALLPYYVSQSVGWVYIRESIGDYRFYKDFKFDYLDYYCGIESGHERIKKYDLEKEKKELNFELKQLDSYEVKNADLKVSKLLDERFKGEAENYLEGYQSLNKELSDKEAEHTKLCNKSSMLRGRQKVLSQIITNIKNQRPKIDQCPTCDQHLPGDLKEFYKYSQDVNDALKEKDRVKENIKSNASKLNSIEKSLTYLREKIENEYGVLRRLKSENITFDSWLNHNANLRMLKNISIKKAACEKRIHGINNDIEKLGSGVDIDSLRKAKEREFLSIFKRKASALGVKLPKETKYQDLYSINSFPYQGVELHQLLMAYNFSFYEMVIKAPAIHSFPFLLDAVFKEDIDSESRSNIFKFLSQETKSSGQVVFSVAEYKGDETSSNPLFNVDAIKKEYFPEDTKLICIGDSKSKRAFLSKAALIDSSLVDNTMRLLETV

SEQ ID NO: 92116 - protein, 373 aa, Rheinheimera sp. EpRS3
MSTRKNSANSGIDALLGFEFQRNCALYLLLSDYDSFKDREFFLSIEHHDDFLYCYRTGCRSNIEEVRSYQAKKLSGNVWKIDERFSEVIAKILEVGNRLRDDPSPKCHTYTHELTFISNSDIELKFRPNKKEKDAGKKELTHVFNEQNCRHNYDSIPDDIKYFLSKKVENFCKSNGAEYFESELNNLHIQWVDFPRTKQTQKDCLVGLMSRKFSHVSDSAAAVELLLTMFREVEATYNQGKVITLLDSSKRVEGDDIKKAIDIIETEQKTFQLWREYSAELARKFRIPIGIQNSYENYIRNTFELLKDMTNNEHQIIKNFVHQNDYSMNHYSHSKMFEAYVSDIRGKFNLNLKEIDIFFTALCAFVEHHGEAI

SEQ ID NO: 92117 - protein, 591 aa, Rheinheimera sp. EpRS3
MKTTITFDKLFVSSESHNRCFSEEFSPSVNLISGRNTSGKSSLIQSLMYTFGVNDVRESLSEILTYQPTFRVDFTIKSNQSTQEYCIVRDSKSIYIKEPKGRIIPFHGVNADNSAEHVKLKDYIRDLVGFSLVLEQKGELKSAPLESMFLPYYISQSVGWVYLRESFSNLQYYRGFQEDYLDYYLGVSNSFDRVEHRNLSKEKDRLSNDISNLKRYSKKSEFQFSNLVDETFGIEAEEYVEKYVQKSSALEEERNKYIRLCNELSLLQNHHKILKRTKINIKSQNYNDIDRCPACTQILSYSLEGLYSHYQKYNDTIELESHITQKLIDKMSSINTSKKNIDKITTEINDDYGVLLKKNIDGLTFSQWVENKANITLYKKMQEDISSYQKKLEEVKESLASMGTEQETFSVRALRERTFREIFTNYTGQLALKPLTDPRYLDLYKIHSFPRQGVELHKTVMAYHFSLNAMIEKAGVAHRFPFLLDAILKEDIDKTNLENILSFVGKNLPNDTQTFVSISEHINDSDDNKEKAQDTKAIQTIRVKDAMNSYFPQGTKLIYIGCGKIERGFLSQSLDNYSDLYNDTIEITAIQ

SEQ ID NO: 92118 - protein, 387 aa, Methylobacterium sp. Leaf112
MAADALIELIDVFSDPDLIETGGGHGQKGVEYQRNWAVVQMFVLEEGSAPDFLFLFEAIQDIAVLDSPNAPTRIDLYQIKKKDRGEWSWAGLTKLHQPPDPAKPAKTKGKPTSKPLADVGDSPIGKLHAAVHAFSQLASAGRFISNAGCDIDMADGSNAATSLPVALEALPAHFSNLLTSALASLHKPGTAPPDLSRLVLEKADLPVDSTAVFTVGKAHSFLVRRSPKHAGQAQSFVDSLLAKIGPLGAKTATCSTFEGMKSQHGYSRDDFIAALGTLEEVVDVDFFLNAWLTQLQQEGMGIIEMTSIRAAVAAIYRRQVMGKMLPEEIQIAAACDEWLMDHNDSSKLMPFFKDALAHLSGIFPLKKSAELQAHFAIRAINKCVALN

SEQ ID NO: 92119 - protein, 540 aa, Methylobacterium sp. Leaf112
MVGRNHTGKSSLIKSLFTALGARPEGSLDRWDKNAVALVRFSVNGESYHALQQQSYRALFTADGRCLLATAAASEWGAAFADLIGFNLVLTGRNQEAVGADARAFFLPFYINQDGSWHANWSTFPSIKQYKAPVQPILEYFTGVKPPKYYETSALRDIAQAALRELQREQKLVLHVRERFGKTLPLSGPKTVPDIFEQDVSRLTEEVTRLNRQQEELRNVQVRDQEVFDSLQLQVQMAREALRTYDGDASFLRTEPHDTLTCPTCGAEHNRTFLDILHYAEDARVLRELVIRLQADSGKVGKELERTRRRLHELDRSYWDISQVLEVRRGDLKFDDVVKSMGAEVAFVAFENELRGLKAQIDEKLSAIEIYEAKLKELTSRKRSKDILGLFRSSYAQARVALNLPIVDTKKLRLTSRPDVSGSGGPRSILAYYAALWATSFGEYGSFVVPLVIDSPQQQGQDETNLPKMIEYVSRNLPEHSQIILGIEAATSEKFDHVIDLSEPYQLLKEGEYASVNAVVAPYIEQMYASLFSGSEEQAR

SEQ ID NO: 92120 - protein, 352 aa, Rhizobium sp. Leaf453
MGVVEKLKQEAKREDGGAVLTERLDYQYAWGIQRMLALHVSDQSYAFLFESHDDILELDHEATPKKVVFYQVKTRKSGNWTVSRFTERKKAKDGNGHGASVAGRMFDNIRRFSTCIDRAVIVTNMPMPKLSRDVGEHCLTTLDKDSLKELGIAMSAEDAAFVTATHLPYYHLNYSPLHFDNAHHTVVGQVADILFKRTGSERGAKTFFDALSGECRRKAKPQPAVRTLTGFDAAHVLKRSDVESFLGIHGEHTAPSWANVAPFLQPLGFVRVTAIMKAWDRYEIERRTRWETLRHVAPKIATAIEPIFNGRHDFVVALQEAVVEVRDVVQAWSPTADDAAIAAMILYEYQRQ

SEQ ID NO: 92121 - protein, 562 aa, Rhizobium sp. Leaf453
MKRLSFERLELLSLTERKARTIEFHPKLTIIQGMNGVGKSSVIKSLYWTLGAAPQAIHRDWAAANVKSRLHMRIDDAAYSVVRDGRQLAMFDVDGKKLISTNSITHEFGPFLADKLDFGLTLLNRQNEPEIPPPAYAFLPFYMDQDGGWERPLSSFDRLTQYANFRRAIIEYHSGIKPNEFYKISAERTVAARLKSEALSERNTVAGVIAKLGLDPVFQGIELSAYAHDAAVEDLLARLTELRDARQRRAAKLAAVVDERLLLEEQIELARAAARELGADANWAASDGRETIACPTCGTDHRNDFRHRFSILADRDQCFEFVASSLDKIDDLAKKARDVEKGMVSTDRIIAEVQSTLEVERERVTLKEVIENEGRRQAMSLFNEQISELDEKIGTFEASIVEMEAALKEFNKRQHREQRERFYAERMRSYIDKLNVLNPDYDAISKITGRIVETGSEQPRLLLAYELALLATIQEYSTAFSAPMVIDSPNQQDQDDRNARSMLSLIIDSRHPKGQTILGTVSMHGIDPGDASVIEFTDKRSVLQNSEFEVVSGSLRPVLETL

SEQ ID NO: 92122 - protein, 329 aa, Rhizobium sp. Root1204
MALVLDLFSQGKEFVALFDHHDDLVVFVGEAEDSELSFYQVKSSSELTWTPKRLARRSPQGELPKSIVGKAYYNVAQFGPEIRRASILSNRPLSATLATATKSDLHDGELSVADLCSADQDTLIKSLEADFPTGFDKTDTTLLTFQRVPFDLESYRSTVLGRIVTMLEELDPDFVAVSSPFYTALLSAAGECTGNKTKSATVEELRRRVALDREAISRLIVRVQSRSKNLVEWWPAVNDELAAAGVRAMQIQRIKIRCMSYVDARRAGDRTAAKLNKAIGDAISKTAVSGMDSVLEAAVALKGHGLVEPASELYDLQSAMIVELMEAMT

SEQ ID NO: 92123 - protein, 522 aa, Rhizobium sp. Root1204
MKSLYEALGATPNKIDDRWKSANVASCLEFEFAGETWFSVKAHGVHSLFDDKGVRRFWGQRLVKDWGPKLAEFFGFKLEMVDKDGETLTPPPAYLFAPFYIDQDGSWDNTWVSFRKDFYLPESAATLADYHSGIRPDGYYAAKAELTKEKIVLSSLETAVETLRQAMTQIEEIEGTTPTYDLQEFASECDDLVAESERLLVLQAEHRRTVSDLHEESHLVRAEAVLLKNALNEMRGEFELASSLPRQVECPTCGHEYQNSLAERFALIADEGVLSKALTDAQSKLERLVEKERAERGKLDAISTSIARVQKILDTRKQSLSLNDVLVAAGKTEAAKLLRVSLNEKIVAADGSRTRADGLRSSMNEFTDRTRTSEIRKFYRTRLSMYSQELDVHLDDPDKQSIVSINVARGSEGPRALLAYYYAFLHTKMAFTTNVRFPVVIDSPNQQGQDKVHLPQMVKFIFDHVPGEAQTIVATEDASGLEFEGVTIATYGEAKRQVLRENEFDRVKAVFDPFFQKILAMD

SEQ ID NO: 92124 - protein, 388 aa, Acidovorax sp. Root275
MDLIHEKAPREAVGRDTMVRFRMQFQAAAFAALEILSGKEVDRVYCDYHDDFVVRRTVAGVVEYHFFQVKTKGRANQQWDIDGVFALKKTGELDTAEKLEAIRSSIAGKLFVHTVEFGDQCREVTVLSNVHFKDEVHNLVADLAAGTSSKKYTRQLIEKFAAIVSPNQPLSPEQVEAARQKLTLLPGVQYIGDTLEAFGIAAHNAIWKHSEIELHQHEVERIARSLVTLVEEKSCAPINGLSKTDIDLATGVGLEDLLQVLSISTQVYQTLQQGGDPAAIKAASVLQRKLKEAGATEPMIEAASRAKVSWDVWFRSARHTFPDFTFNLLLDEIDKKCKAWLLGGGALADLENFVQEILDSSIGKKFSALDTDLVFGGFCATIVRRATR

SEQ ID NO: 92125 - protein, 607 aa, Acidovorax sp. Root275
MRLKSLQVEPLGEGGWGSPLLEFGHRTTMLFAANGSGKSPVVRMLASALGFPNNFRAEILAKCNAVVLQAEVEEKQLAIRRSLGAENGIFYATIDFDGEQTAHHSEASFSAALFHLLGLKPPRLVSTKGEETKPYIATLLPLFYLIQGHGYSAAYRAPSSFITDQFVEMVRFAFGLNPKHSFEVKKSIIEERSALEAQTRKIVAAQRVLEYQSRGVDNSDANQSALQLSSENLTQQIDGLRVSVDAKGSASSTLTELLRQKDVQIRARQLELFELQNRVAGIETIRAEIDGEVKTLGLNEEALGVFKSFQEICRAPNCGLFLGSAESYGKNLLYLKDQIKDLERNSQRAEIRVEQLEERLEELGAERQTLVDNLESPSASGFDQLVTAVQTLTKQLVGVQGELARIAAVKNERLKLFTLEQERDRIQDRIEGLTNTGRADHAFNDLRRRLRELTVKWMDMLDTTSVSRNVDIDLNLRFTFGGETLETIGSGGTSSTTSRLVLAIHAALLEAYLADKTRPFRFLILDTPKQDELHTADLARYLTELEKMCEANDAQLLFSSTEYDHPTAKQDRRWLPKYRGPEKPMYLGKRTDLLPGDVAGRFPADGA

SEQ ID NO: 92126 - protein, 426 aa, Variovorax sp. Root434
MTNARADTEPSLNDVLSLFKDYSGDETGGIHAVRGFSFQIWLAVLEVLKAHATGEDYAVVLEWQQDIAVLNSSSQPSNVRFIQVKKNESSHRWTLHGLLAATAAEETLVKDTAVTNKTISGSALPTAVKTKVKKAVPSTLAKLYFHRRRFSALAQPASLVFASNAPFYVGIGDDDKDETVDEVELDELTPEAVTKVESALRKQLEIPTDEVVNLEDFILRITNCPPDEGHKFVIGELVELCQNDKMGLEVKAPFVAVCLVASYVKQRAGKGSYSKDFAKLLSRAVTRTDVTHYFAAANDAHVRPQALVEQIIARLNAELADFEMVKTMQLATSSACAEVTNRAGVVWPSAEALVQLAASTDNYKARGHIKDRLPAWLADFRALNIQDARLFNDGFLYCLMAMILNDAQPLRHLSASATGPQPEAEE

SEQ ID NO: 92127 - protein, 597 aa, Variovorax sp. Root434
MNRPVVFNALWILSEKDASARYLTFNAGKNLLAGGNDTGKSRVLKHLVWALGCEPARRATGDFDSNVVASVDVSIGNRALTFVRQNRRRAAFDDLGLLLFATESASAWAQFFAETFDFPLKLQRHEEGKFDFAGPSYALLPFYVDQDNGWGTKWATFTDLTQFANWQTSVFNSFTGLKPAAYVRSQLQRDEAAHRLKIAKAESKLQDSSYQRVVAMLPSETTAIDETQFAHELRALSEQAQTLREEQDKVRTGLVALAQERQQRIGELNLALASERELVEDQAFLAGYKDDAPLVCPTCSHVHTTTFYARQALAQDTQDIHEVVIRLQADSEKLRAKELAMQSDLDSVAARLRTLNDSLNVNREGRSVADVVVAKSLSTLKQAYDQTRHDLAAEIDTLAARKQELNDELAALTDKGREKRIKEFFSEKLVSIADQLDINKAEISSKVKLSSRSPSASGSNAPRAVLAMHLTLLSSHHEFGEGPTFPLIVDTPQQSGQDPKSLGRMLSAILGDTTNGQTMVATESIPEGWQPPPGCKVLNFEDKRRLLQEDQFRDGVHALSYMVTTMREAILTAGSRNEEDTEGTVAPPDEIDEEDED

SEQ ID NO: 92128 - protein, 414 aa, Acidovorax sp. Root70
MTSGEQPSLFDVASLFRDYSGDESGGVHAIRGFSFQVWQAVLEALGAHATGEDYAVIMEWQQDIALLDSSTAPTKVTFKQLKKNESSSHWTLPALLNPPDEKIVALPAAGATKPKPKRKSTRSAGKVSVLAKLYFHRRRFGQVAPTRLVFASNAPLYVEADDGSKQTLSKTAFSALPAATQTKVSTALRTQLEIPASEAIDLDCITFEATNCPLEHAHKYAIGELVEHCQLGKIQPLVTAPFVAVCLIASYIQQRAGSASFAKDFAALLERAVTRADITSYLAAANDSYVSTQDLVEQVISRLDRELADFEVVQGMQDELNAACAEITNRASAVWATVEALSALYKKHDSYRTRGPLKDRFPAWREDFRAGASAAGAPFNDGFLYCLMAMIVKNARPIQHLSTTSAGTQPKAEE

SEQ ID NO: 92129 - protein, 596 aa, Acidovorax sp. Root70
MSRTVVFNALWLLSERDARARHLTFNAEMNLLAGDNGMGKSRVIKHLVWALGCEPPKRAAGDFDSNTIAVVALTIGKTQRTFVRQNRGRAAFDRDGKLILATASASQWNEYFAEEFDFPLKLQRHDDEGFGLAGPSYAMLPFYIDQDGGWGVKWTNFTDLTQFTNWQTAVFNSFSGVKPSAYVRDQLLRDEASYKLRLAKAQVRVQQTSYERVVAMLPPESTVIDESLFAEQLKEIAVKAQTLKEEQGVVRAELMLLAQERQHRIAELHTALESEKSLVEDLAYLADFPDNQQLVCPTCSHVHTTSFHARQALAVDAHEIHEAAVKLQGILEKLKLKESELQRRLSAVVEKLRDLNASINQKQDGHSAADVIAAKSRDTLERAYRATNSELTAQVDTLAEEKKTYEKALEKLTDKGREKRVKEFFGETFISVADALDVDKKEIGKKLKIGERPPAASGSYMPRAVLATHLALLATHSEYGVGCKFPFVVDTPQQSGQDPASLGRMLDAILVSSGSGQRLVATESIPEGWLPPKDCKVMRFTEKRNLLREAEFKEGADAVGAFVKAMRDALAGSDQAAGADESEPAGPADAEDDDEE

SEQ ID NO: 92130 - protein, 363 aa, Elizabethkingia genomosp. 3
MGEKKIDSNSGVQASVGFDFQRNSCIYIFLEKYSALKDQNYFIMLEHYDDIVFGILNEKSELAEITTYQAKKSSTNWTTNKLYEIIQKICNSGVELLKDELKKSPSYSQLHHFITNNTISLDYKCSTSKKTERFYVNETNESVKYTALPVDCQTNLKKGNTNITFDKDQLDQFSNLNFSFIDIGRNTKSQLELLSGKFKTVFGKLILDHDAARDTFIFNLKGIESTYNKGDQPKLKDVSKRLESSKINEILNILTTKNLALEMCRKKADKIYDELGINVVDALNFELDFENSLDHFKDLKQGEHQKIIKYIESKKPTFASYTNDVNCIKYLHDDFLKYNSSVLSPTQLKAAIAAGYYQILLQK

SEQ ID NO: 92131 - protein, 577 aa, Elizabethkingia genomosp. 3
MKTKLKLNKIFIHSEVNKKSFFTDFGNNLNVIYGANTSGKSTLIQLILYTFGINDNKTKLVKILSENIFTRLDITIIKGTQNNDFTFVRNDETLFIKNHTENKIITFNGISGNSSVEHAKLKEFFNNLFDFDLLLESKSGISKAPIETIFLPYYVSQDVGWVYLRKSFSNLDFYKNFKDDFLDYYLGISKLEDKERKKELENELNDKKLKYNFYLNFERTDKTIETAKLIDDSFKGKGQEFINEIAQRKSELLELENEYVKKSNILTYNTQRLSVVSKVSRNHKHQFPGKDNCPICQQILPIDTKEIYQYYQEENDSIKIKEKISLENKKIQSDINSLNKKISGLRDMLANDYHRHIIYSQKNVTLDEWIKTQANIKLEDSINANIGKLDFEIKALKEKLQLFKNDEDLENERLAKNRKFKDYYNSNNKKLGVPQLDDRRFNYIYELSSFPFQGVELHLAVLSYHFAFNKIINETNNIQRLPLMLDSIFKEDLDGKSKDKILDFICTNTPKDTQTIISLADNKLKDSKIEYYKKTFFNNNTKLICIGDSTEKQSILKDHHSNLDNLLNSTYEIMEHV

SEQ ID NO: 92132 - protein, 354 aa, Sporosarcina sp. HYO08
MDNFKPRENSGSRSTNRLNLQASYAIIKILESHESDFTVVMDLVDDLAIFFNEGKNNINTYQIKTVGSKSSNYKLNSLISDDVFLKLYDHVEQFEKSINSINLITNMPISHTYKDPIENKNKTVIVSNTKIRLNQLQPEVRMKIEGNMKKSSHFIKHGLSDKFTFSLWDISVTSHYQITQAALLEFCSNEYPYMDSKTITALHKTLYEHLLNKQSYEFELTDDMEEVFKHKSYSSNSFKALLYQATSVGTLTMEKINSDYIHFDNLLHETKYNQALVRLKTKIFQHTNLFERNFEIIAPEIQKTLSKVKTKKELFEVLILQLNTELVYELSQIEKELLLINGIEEVLKRGLEDE

SEQ ID NO: 92133 - protein, 584 aa, Sporosarcina sp. HYO08
MNNLMFKQLEIIDIVTYEAFSIEFVKGVNIITSTDNSVGKSTILKSLYYVLGAEVKFGHRINPKNLLIILKFTFNNDEYTIMRNQNAYKVIEPNNIINSFHNNKAISKFLSELYGFKIEIEGTKKRIESAPPVFYYLPYYIDQMKGWQPDPENFERLGQFNKPKRDASLYFHLGILGDDYLSLINRKEELSNEKKDLNIKHEHTHNLLKIIEEEVTSFDISLNNSDELLLQKRTHLKKYQKYNFDANNIKQKLLEYKETLYQLNFTIKNIDKSVRNEESKKKLINETDLYIDCPNCEFEFNIPQNKLFKVNYNVEELQSHKVELLDKKSKLINEITKIEKELYIFSLQLNEIEQIQSGNSNSLESIMKFKGLESTKNKLLTKLKEYTVSIAEIEIDIKKITAKITKINKQKSQIDYKYSEFLEEYFSLFEITEIVIEDNNRKQFVPSKTFSSDGANQIKLNLARLYSLVSLINHYKNGVLFPIVIDSPKTGEQSFKNNKNTLDNLVHKIKLDNQTIIATIDFELSSNKRKFKLIKRSRRAKLIQNKKLKVIKLADREASLLNSSIFNESLQKYEEYIRIFTTDQ

SEQ ID NO: 92134 - protein, 211 aa, Xanthomonas sp. NCPPB1128
MAGSDNNKDLQLHQVAPTEQVGRDTIARYQAQYRAAAMECLKLLDRQSIDRVYCEFHDDFVSRRSVGGAHFYRFFQVKTVGKRNHLWSIADLFGIPRSKKKKASKKKACPTPAVATNDSAGNVDDSNNLSSRIADSFLGKLLLHTVRFGESCEQVSFLTNANLNDEVELVSAALEGGISEPNDVLSMLSEHFNSACKIADPLCLGRSSSVS

SEQ ID NO: 92135 - protein, 515 aa, Xanthomonas sp. NCPPB1128
MGRYYAFRRSFKGAFFIEVSDPLAGDAETLAFHSEADFSRYIFQLWGWADPVLVSVSGAATRLYVSQVLPLIYLDQDEGYSSFYFTPSRFIKDQYTEVMRSVFRLPAKNAFEQRKLRRELQERLERLDLSIVRRQRTIGQLESDVTHPRRSEAELSDELAQVQCSFESLRQGGDARSESEVTLDGEIALLRRRVSALTADKAEHRARLSSFLAISNEIEIEANTLSLNEEARAIFASFDSVCANQACGLFVNSSESYGKSLLYLKDQLKDLERSRKFHEDAVARLDGSLVDAEQELRKKVHEKEALQTDVHAASLVDATALVMERLIALKKDLLLEAQLHEEEQSYVAELDARSRTHDELSNVMRGPGNVDLVLLKVKSALEERIRHWLGVLHAVNLPKQIAIDYDFGVDLVGDNFKAIKGSTKTRLVLAVRTAALEVLLMNDRFSPRFFLLDTPRQQDIKKGDFANYVDALKQLSVAYGVQIVFSSSNYRYDPDERDREWPPRFEGVEQAMYLG

SEQ ID NO: 92136 - protein, 389 aa, Pseudomonas sp. L10.10
MLDTKKAREQNGRDSFSRYRAQVRSAAVASLSILEGANVDRVYCDLHDDFVIRKKDKDGFSYIFYQVKTKGKQNHNWTINEVFGLNTRLKDQTKQSSDSIKDSFIGKLLLHTVIFDEHCNSVIFQTNVNNSDEVDELLTDIESGAFASKFSKVILERFTECFGDDCITYSPEEAKSKLSKLSFESDVSFLKDGDNYFELIVKEKIYQFSEIDLERAEFREILLRLLDLVERKSSGVIKTWDAESIESCAGISIDDLLTILSISKDAYHSLLKGGDSSAIKSASMIQRALKAGGADTSMVMYCSKCKTDWDLWFRNARHVIQELDLLSISERVGTTLKNTVDLQGFLALNSLRMPIKNLLAELEAQGLRFDLTEDLLLGGIFSAFVRGKS

SEQ ID NO: 92137 - protein, 589 aa, Pseudomonas sp. L10.10
MKLISLKIFPNGQLGWGSGLLTFGKDITQLLGPNGCGKTPVVQSIPFCLGFPSIFRNDIYDRCKHAELTVASDKGNLLLRRIYSRELDVEVVEPTGVVQRFYNEKDYSRYIFEWLGLTVHNLVTVGNQPGAAYLATLLPMYYLDQDGGYSEIYCPPSKFIKDQFSEMMRMVFDLPVKNSFDVKKDRFRAKERLDFLDKDTQTLSRMVETAKSNILEIKKSRPELTLEISQLEFEVENLQGAGASRDDSIGALDRLISNHRNTIREVSSEINQLQRRNLGIGKIVHEINTEIETLNLNEEARRVFLSFREICGADLCQLFSSSSESYSKNLLYLRDQIKDLERNAGLDEVRIEELNRQRTAQEVAIQALVDERNLSSTKSEISTLVEAITRLKSQIFTLQIQLSELDKVAVLEEKQFKALVERDKALTLYESFTADRSHSPDLIKVRSDIRRYFIDWLDLLHTYNVSKDITFKDDFTPLLGVETISQLKGSTKIRAVLAYHAAVFQVFAEKGVMGFRFMILDTPKQHEINNDDLGRYLSALKALCVTHGAQIVFSTTEYHYDGDDNDVEWLPPYEGQEQKMFLSLGGIND

SEQ ID NO: 92138 - protein, 350 aa, Stenotrophomonas sp. KCTC 12332
MLELEQSNAPDFLLLFEAVQDVTELDSVSVPTKAAIYQVKKKDNGTWSWSMLTGISAPKRPKAAKKVKSAASTPAAPKPTAAPSFDKVGDSILGKLHLSLTAFEKLPAEGIFISNAGCDVPLASGANAATSLPCALSDLATDHAQILTDALHTLGAAGAPIPDLKRVRLARVAIHPDDPSAPTVTKALELLTQRSPGHAAQAQAFVESLVMKVSALGRRTATCATFADLVKERGFSRAEFHSALSSLATIPDRNALFESWLTKLQQEGFDFRVLTTMRMAAARTAAERLTGASPEAFEIDAFCDSWAQANACGPDLKPYVDAALVAMKARFGQFRDEELLARFVMRAVTI

SEQ ID NO: 92139 - protein, 578 aa, Stenotrophomonas sp. KCTC 12332
MHRFRFQNIWLLSLRDKKARHVKFHPRKNLIRGRNHMGKTTLIRSLFETLGATPQGTLESWDKDAVSLLEFSFDGKHFFVLHQNGRRALFSADRQLVATTSKFAEWTRVFCEVTNFNLVFSGKSESDVVPADAACFFLPFYVNQDGSWQSEWNTFTGLKRFAAPWTAILEYFTGVCPPAYYEARAKKGQQSRVLDEYRRELRLLERTLDRFSRTVPVHGPKLNAANFEAEIDQLTREITDLNARQEKLRSDAVREQELLTSLDHQTRLADEALKAYNSDAAWIRTAGSEPLICPTCHAEHKKPFLDLLQFAEDARVLRELAARLRDDAAVVRARCQKAFRELATLNESYLRISRLLDTRKGELKFQDVVGGIGAEGAFAAFEAERKQLQGAIDEAVLAVDKLDETMKDLRAIKRTKAILADFRDFYAAGRIALKLPSIDVSKMKLAGRPDLSGSGGPRSILAYYAAIWRTAHGSNATYDIPVVIDSPNQQAQDDINLPAVLEFIARDLPDDIQLIVGLETTSEFPFDYELHLERKYSVLIEEEWDITYGTVEPLLQAMYANLLAHSDKSTPEPRSTDV

SEQ ID NO: 92140 - protein, 392 aa, Alcanivorax sp. Nap_24
MAGENNGSPKLHEVKPRENVGRETIARYQAQFRGAAFECLSLLEDETLDRVYCDYQDDFVSRLNVDGNYIYNFFQVKTKGKLNYQWSVNDVLGIRKGAKTCEPAKITDSYVGKLLIHTIRFENSCGSVIFLTNVHLNDDLEGLRDAIEGDSDNNYYKLLLQNFNDALTPESPIEDKNIIERIKKLQLKSNISYLNPYDDKFFTEARETIYQYSEIDLQRSECEEILNSLIFLVERKSFAKLLEEIAEEDLDDIAGVSLAEMLDILSISKAAYQSLRDGGDSQAIKSASIIHRLMSKAGASERMIEFVSDCKVRWDIWFRDKRHTIPEFDLNFILEEIENNAAEWAKFGENLTVLRGRIDKVLSDLDDEDLSANLDRELLLGAVFSFLVRGNA

SEQ ID NO: 92141 - protein, 437 aa, Alcanivorax sp. Nap_24
MAKCSSVSLTVEHEEDFLTFERFFSDKFHIEVSERGSNETSIFYNEKEISEYFFSRLGLSPLALTTNKNEPTYPYISTFLPLFYIDQDAGYTSAYKPPGSFIKDQYAEMIRLAIGIAPKHSFEAKRFLIEKKRELDLINIQIVNSEEFIRKLEEQSDDETSVSELEDELRQLRDELEELRNSFDATNDADFVLQRLIREKKNERFNLSASIKELESRISGFNKIKGEIEIEINTLSLNEESRRLFSSFEDICATPGCGLFTSSSDSYGKNLLYLRDQIKDLDRNTKFQEIRVDDYSSSLRKLDEEIASLESNLRKEENGSQTAPLISAISGLTRSIIDRQGKKEVMERIESEKRGYVQLLNRRRGLQGDISSFEGAAGSNDIRILEFRNSYRKKIIEWLDVLSTKNVSRDITVDADFNVLFGREKLWFIADYREKRL

SEQ ID NO: 92142 - protein, 345 aa, Paraglaciecola sp. S66
MVKLHEISPREQDGRDTLSRYKAQTRAAGLASLEILENKSVDRVYCDWHDDYVVRKSINGKIVYHFFQVKTKEKRNAQWSLNDIFGVHNRTKTENIAERITESFAGKLLIHTVNFIDTCEAVVFLTNIHLKDEVEDLLTSLDQDDYSHKTLQHLTNHFLECFCGGKPLYTDEEIKVFIRKFRIIPGLEHLKVDGTQFEALAREKIFEFSEIDLEYMEAREILDSLLNLIEKKSIGVVRTALNEKQLDELAGVGIEDLLEILSISKIAFQSLREGGDKKALKNVSILQRILGKSGTPKNLIDYAAKCKTDWDVWYRKNRHYIPDYDLAMLESKLSDVIKKHSPSGV

SEQ ID NO: 92143 - protein, 590 aa, Paraglaciecola sp. S66
MKLVSLTVIGRGVTGWGTEELFFAKSITQLYGANGSGKTPLVQTIAFCLGYSCIFRDDIYSHCQCAKLKVFIKSKPYELERKYSSDFEVLVKEPTGTKQTFFKEGDYSRFLFELLGYEFPQLVTNSNSFTHPYLSTILPLFYLDQDIGYGDFYNSPGSNFIKDQFIESVRLSINMPAKNSFDQRKSAIDAKKLVEKADQKVHRFKAIYEDTLKGTDIGSVSVQEIDNQIESLKSKINKIKSSQNLKLDATDSIDKLISSKMSQIRELQQEISFLESKCSSISSIRSEIEVEINTLSLNEEAKRIFMSFSEICSVDGCGLFLGSSESYGKNLLYLKDQIKDLVFNAESSELKIKILKNELQAHFDDIDRLNLARENTEKDEGLSALVEAIHMTLAEIISLEIKKREIENLSEIEEKYLAAERERDIALNRQDSLSSSPNKSSLGLIRFKSNLTQSISTWIKTINTKNVPDDVNLLDEFKATFGGEKLSAFKGSTKLRVVLSYHAALFEEIIKCNKRGIRFLILDTPRQHDISAEDLNQFIKALKILADKEDIQIVFSTTEYKYKKGANDIDWVPKYDDPSFDQTMYLGKTN

SEQ ID NO: 92144 - protein, 366 aa, Achromobacter sp. 2789STDY5608612
MQYQAAAYAALEILEGNGVDCVYCDYHDDFVVRRIVDGKTTYHFFQVKTKNKMNAQWDLKEIFALKKRGQKNDNDSLKAVQSSFAGKLLMHGIIFNAECSEVTLLSNIYFHDDVVTVVDELRGKTPKSKHAKFLADNFSAIFSLEPAANDTHVADTLGKLSLRPSVGYISKERDVFASATRTAIFNYSEIDLTFHETAELSNGLVDLVYRKSRTPLKGIAPHELPARIGVGLDDLLEVLSISRSAYDALLKGSDPKALKTASVLQRWLKGAGANDDMIEYASQQKVNWDIWLRSARHIYSPLDLHALLGLIDSLYDRWAQSGQGFTFLNDLLQGLDGDTTVGKVEGLDREILFGAVCAVVVRRHSK

SEQ ID NO: 92145 - protein, 585 aa, Achromobacter sp. 2789STDY5608612
MKFLSLKLVARGIHGWESPDLVFGARTTSLHAPNGSGKTPLLQAVAYCLGFASQFREDIREKCQAAVLTFEHDQSTYTLRRDLGNDFHITIQTDESEREFFSEGDFSKALFQEFGMSVPILVANNRQSATPYFSTLLPIFYVRQDGGYNDPYRPPATFIFGQFVEMVRFAFGLGPRRSYNAQRDLIAAREQLDGAQRRLVSQQKIVADMSATIDDSPLSLDRLNQKSSMLTEQIQDIKNSVDAAGAANDAVLDLLQAKEEQIRLTRRQHADLQARLAGIDSIRGEIEGEIQTLSLNEESKRALESFFDICGRADCGLFMTSTESYAKNLMYLKDQIKDLEANAGRAETQLEILKARLADQEQERALIASKVSQPERQNATQQLISSIQALTKELLETEQNLTAIEQLTGEKSKYIELDNERSRIQDRIALFSNNTRSDLEFSKLRLRVRELIVKWMDILNTPNASREIDIDLDFKIKFGTESIDVFTGSTRSRLILAIHAALFEHYLQDLKRPFRFLILDTPKQQELDSKDLGAFLHALQEVCDKFHAQILLSATEYHHPIGQRDVEWLPQFQGAKQLMYLGPIN

SEQ ID NO: 92146 - protein, 391 aa, Achromobacter sp. 2789STDY5608612
MSGIRGATELLSVANNPKYSETGGGHGAKGVDFARWWAVVRMVELEKANEPDFLLLFESVQDVAELDSATEPTRARVYQVKKKDAGTWSWSVLTGTVAPKGASTAPKKPTKAPAATRKALDFKKVQGSALGKLQLSLNAFTALSVEGVFLSNAGCDFPLAGGGSAATTLPCTLADLAADHVQLLTDAFASLSTDGSPPDLTRMKLQKVAIHPDNLNAPAIAAALELLIERSPSHAGQARAFVESLVMKISPLTRGTDCCQSFDELVKERGFSRSAFMGALAALEAVPDRSALFNDFLNQLQAEGVDFMTISSIRVAATRAQQDRLVGGTDLSREIDHFSDAWLASNPPTSKLRPYIEAALTALKAQFGAQRDNDLTARFVMRAITKCVDQN

SEQ ID NO: 92147 - protein, 535 aa, Achromobacter sp. 2789STDY5608612
MGRNHTGKTTLIRSLFETLGATPQGKLEQWDENAASLLEFSVDGRSYFALHQGGRRALFDATFNLLISTSKFGDWSRRFCEITDFNLVFSDKKQAEVVPADPACFFAPFYVNQDGSWQAEWNTFSGMKRFNAPFKPILEYFTGVCPPEYYSASAEKSQHSKVLDEHRQEYRLLERAIDRFSRSVPLSGPKVDADNFAAEIELLTKEVNELNVRQEVLRSSAVREQELLNSLDHQIHLADSALAAHDSDAKYLLKEGAAPLICPTCHAEHEKPFLDLLEFAEDARVLRELAARLREDAAEVRKRTQRVFAELSSLNENYQRISRLLDSRKGELKFKDVVGSLGAESAFATFEDERKQIQAAIDAVVLNVDALETRMKELRSPKRTKKILAEFREHYAAGRVALQLHSVTTKTMQLASRPSLSGSGGPRSILAYYAAIWRTVQSKEGSYDVPVVIDSPNQQAQDDFNLPAVLSFIAKDLPAGMQLIVGLETPIDLKFDHEMTLTERYNMLTEDEWELTDKLMEPLLKKMYDAPLSQS

SEQ ID NO: 92148 - protein, 341 aa, Sebaldella termitidis ATCC 33386
MLSETKVDFGGVEAIRGFTYQKAVTALILLLNYNNETLWVVPEGYEDIDVHLEENLYYIQVKSKSLTTSKLIVPDKNQEYSIIEKLHNNKINSENLNFKIVCIDCDCIKEDSAEATVLFTRTDTHINKYKYGIDIGKIEKSRAYKKFNDSKKENLKEIAKKIYVYKTPFTKELDSYWTYLLGVLTGKNIVTNDHKGKNTLILIDSIIKAKTQIKFLNDQVYEDKKIHTSMIKPLIETNKMSALFNECLEEIGYGILQKDEINQAKAMIAIPLISDRHYSYIESCLNDLSYLKSLRYKIKDYIDFSLGEIKKNEQIMNELSENDIIARIVLYYVRKEFQHDI

SEQ ID NO: 92149 - protein, 557 aa, Sebaldella termitidis ATCC 33386
MTFDKFIILDYVNKKSLKLEFSNTQNLIVGKRNKIGKSSIVKSLFYTLGYNNGSSMPDGWIYNNMKFKLFFTNNGESSYIIRHQDLFYVEGSEKPLDEKEYRYWFQNLLGIDYRLKLSREKEIQNANEYKIYASAVIMPFYIDQDISWRGTPYKSEVMGMYGQSSYKNMFEKLFSVSDDKITKLKEKIKKFKDENKKLLEKISVLEELIEEQIKQKNSSIQYDEEYFEKREEYLKILSKINDEIQNNTKEKMKISEKLNTIFSELNHLEEIKKMLEKKNKNLMGVCKHCGSSSSITQLADRLTVMNNIDEISYQIDTTRKSMELEQQTMNEFIEREKKVKNIYNEYMSIIKREPDLKSIDSYIQNSAESLASDVLIKKKEKAGTKVGTNIVEIKKNESLLRTLESKQQKKTAEISKKYEELFLDIISSSLTSISNYTLKDYPFLNFTKIKGSGTDANLKTYLVYLIYFNLLNSYSEVKIPFLIDSFITTELDIENKKEMFSAVSKYFLELDSQTFFTVIEENLEYITNHEKYKKHFIHSKPILKDENYEENLEEFKL

SEQ ID NO: 92150 - protein, 311 aa, Staphylococcus aureus subsp. aureus TCH130
MVRENGGANAQRGFNYQNCVISLVAIRNYKKPNFKIYVEADEDFEVNYGDDYHACIQVKGEKNLTFNKLLKGENGKLSIFEKNLSSGKSDSVYKIVVFSFSRKDMESMQEQTDEEELFSNSWLLSNDQKNKVNNDRVENFSLVKTAFDNDMKNARIYLKGELVQQNIVVEGRAEVILNELFQQILQKSEKKVQTEQDKELKKITSKELDLILQKITAKARFEKELKNLRFNSLKEEKIKKEEKKIILEYMAVKKAVIRFLKSDEEKLENNSISTLISETFNLSEMNCLSENTKYAIAISAYCDILEEIAYE

SEQ ID NO: 92151 - protein, 259 aa, Staphylococcus aureus subsp. aureus TCH130
MNKLTIISLSILDNKEKKANKFEFSEKSNLIISERNGEGKSSLIKSIQYCLGSNLKAFPKGWDYKNYVFQLEIVIDKNKILIQRYNNIITVLDDGKIKKFGYLKDYSDWFQDKMEMNLKLVSKNKNTSSLASLEAILSPLYIDQDKSWDGILYKNSFEGLAQYKSQSFPKEVFEYYLGISNNIMNDKINKLNKYREKSKEKKVKIEQVDFYIKETDRFSQMITQKTDKLSKEKMKLDILQQDREELRKLLTKTKKDYQK

SEQ ID NO: 92152 - protein, 311 aa, Staphylococcus aureus subsp. aureus 21259; identical to SEQ ID NO: 92150

SEQ ID NO: 92153 - protein, 287 aa, Staphylococcus aureus subsp. aureus 21259
MNKLTIISLSILDNKEKKANKFEFSEKSNLIISERNGEGKSSLIKSIQYCLGSNLKAFPKGWDYKNYVFQLEIVIDKNKILIQRYNNIITVLDDGKIKKFGYLKDYSDWFQDKMEMNLKLVSKNKNTSSLASLEAILSPLYIDQDKSWDGILYKNSFEGLAQYKSQSFPKEVFEYYLGISNNIMNDKINKLNKYREKSKEKKVKIEQVDSVYKNYSSQKNISKTIPKEFEEFKKQVDFYIKETDRFSQMITQKTDKLSKEKMKLDILQQDREELRKLLTKTKKDYQK

SEQ ID NO: 92154 - protein, 311 aa, Staphylococcus aureus subsp. aureus CIGC93
MVRENGGANAQRGFNYQNCVISLVAIRNYKKPNFKIYVEADEDFEVNYGDDYHACIQVKGEKNLTFNKLLKGEKGKLSIFEKNLSSGKSDSVYKIVVFSFSRKDMESMQEQTDEEELFSNSWLLSNDQKNKVNNDRVENFSLVKTAFDNDMKNARIYLKGELVQQNIVVEGRAEVILNELFQQILQKSEKKVQTEQDKELKKITSKELDLILQKITAKARFEKELKNLRFNSLKEEKIKKEEKKIILEYMAVKKAVIRFLKSDEEKLENNSISTLISETFNLSEMNCLSENTKYAIAISAYCDILEEIAYE

SEQ ID NO: 92155 - protein, 441 aa, Staphylococcus aureus subsp. aureus CIGC93
MNKLTIISLSILDNKEKKANKFEFSEKSNLIISERNGEGKSSLIKSIQYCLGSNLKAFPKGWDYKNYVFQLEIVIDKNKILIQRYNNIITVLDDGKIKKFGYLKDYSDWFQDKMEMNLKLVSKNKNTSSLASLEAILSPLYIDQDKSWDGILYKNSFEGLAQYKSQSFPKEVFEYYLGISNNIMNDKINKLNKYKEKSKEKKVKIEQVDSVYKNYSSQKNISKTIPKEFEEFKKQVDFYIKETDRFSQMITQKTDKLSKEKMKLDILQQDREELRKLLTKTKKRLSEVSYECTYCHSVLTRGQSLTRMELDDNKIEILLRKDSINQEIIKTENNIQKKLIEIQNLENQFELYHERLSELKQLSNIDNYVNQKVLQELEILKIEEVIELKEIDQEIKSLKNEISKLKKSLKTDLENINQKFKKLKNKISLQMETTGLSEKKY

SEQ ID NO: 92156 - protein, 180 aa, Staphylococcus aureus subsp. aureus VCU006
MNNDRVENFSLVKTAFDNDMKNARIYLKGELVQQNIVVEGRAEVILNELFQQILQKSEKKVQTEQDKELKKITSKELDLILQKITAKARFEKELKNLRFNSLKEEKIKKEEKKIILEYMAVKKAVIRFLKSDEEKLENNSISTLISETFNLSEMNCLSENTKYAIAISAYCDILEEIAYE

SEQ ID NO: 92157 - protein, 202 aa, Staphylococcus aureus subsp. aureus VCU006
MNKLTIISLSILDNKEKKANKFEFSEKSNLIISERNGEGKSSLIKSIQYCLGSNLKAFPKGWDYKNYVFQLEIVIDKNKILIQRYNNIITVLDDGKIKKFGYLKDYSDWFQDKMEMNLKLVSKNKNTSSLASLEAILSPLYIDQDKSWDGILYKNSFEGLAQYKSQSFPKEVFEYYLGISNNIMNDKINKLNKYKEKSKEKK

SEQ ID NO: 92158 - protein, 311 aa, Staphylococcus aureus M0396; identical to SEQ ID NO: 92154

SEQ ID NO: 92159 - protein, 202 aa, Staphylococcus aureus M0396; identical to SEQ ID NO: 92157

SEQ ID NO: 92160 - protein, 134 aa, Staphylococcus aureus subsp. aureus 6850
MNYFNKFFKSLKKKVQTEQDKELKKITSKELDLILQKITAKARFEKELKNLRFNSLKEEKIKKEEKKIILEYMAVKKAVIRFLKSDEEKLENSSINTLISETFNLSEMNCLSENTKYAIAISAYCDILEEIAYE

SEQ ID NO: 92161 - protein, 338 aa, Staphylococcus aureus subsp. aureus 6850
MNKLTITSLSILDNKEKKANKFEFSEKSNLIISERNGEGKSSLIKSIQYCLGSNLKAFPKGWDYKNYVFQLEIVIDKNKILIQRYNNIITVLDDGKIKKFGYLKDYSDWFQDKMEMNLKLVSKNKNTSSLASLEAILSPLYIDQDKSWDGNLYKNSFEGLAQYKSQSFPKEVFEYYLGISNNIMNDKINKLNKYKEKSEEKKVKIEQVDSVYKNYSSQKNISKTIPKEFEEFKKQVDFYIKETDRFSQMITQKTDKLSKEKMKLDILQQDREELRKLLTKTKKRLSEVSYECTYCHSVLTRGQSLTRMELDDNKIEILLRKDSINQEIIKIEKIFKRN

SEQ ID NO: 92162 - protein, 311 aa, Staphylococcus aureus subsp. aureus CN1; identical to SEQ ID NO: 92150

SEQ ID NO: 92163 - protein, 204 aa, Staphylococcus aureus subsp. aureus CN1
MHMNKLTIISLSILDNKEKKANKFEFSEKSNLIISERNGEGKSSLIKSIQYCLGSNLKAFPKGWDYKNYVFQLEIVIDKNKILIQRYNNIITVLDDGKIKKFGYLKDYSDWFQDKMEMNLKLVSKNKNTSSLASLEAILSPLYIDQDKSWDGILYKNSFEGLAQYKSQSFPKEVFEYYLGISNNIMNDKINKLNKYREKSKEKK

SEQ ID NO: 92164 - protein, 199 aa, Staphylococcus aureus subsp. aureus KPL1828
MVRENGGANAQRGFNYQNCVISLVAIRNYKKPNFKIYVEADEDFEVNYGDDYHACIQVKGEKNLTFNKLLKGEKGKLSIFEKNLSSGKSDSVYKIVVFSFSRKDMESMQEQTDEEELFSNSWLLSNDQKNKVNNDRVENFSLVKTAFDNDMKNARIYLKGELVQQNIVVEGRAEVILNELFQQILQKSEKKFKLNKIKN

SEQ ID NO: 92165 - protein, 441 aa, Staphylococcus aureus subsp. aureus KPL1828; identical to SEQ ID NO: 92155

SEQ ID NO: 92166 - protein, 311 aa, Staphylococcus aureus M0139; identical to SEQ ID NO: 92150

SEQ ID NO: 92167 - protein, 441 aa, Staphylococcus aureus M0139
MNKLTIISLSILDNKEKKANKFEFSEKSNLIISERNGEGKSSLIKSIQYCLGSNLKAFPKGWDYKNYVFQLEIVIDKNKILIQRYNNIITVLDDGKIKKFGYLKDYSDWFQDKMEMNLKLVSKNKNTSSLASLEAILSPLYIDQDKSWDGILYKNSFEGLAQYKSQSFPKEVFEYYLGISNNIMNDKINKLNKYREKSKEKKVKIEQVDSVYKNYSSQKNISKTIPKEFEEFKKQVDFYIKETDRFSQMITQKTDKLSKEKMKLDILQQDREELRKLLTKTKKRLSEVSYECTYCHSVLTRGQSLTRMELDDNKIEILLRKDSINQEIIKIENNIQKKLIEIQNLENQFELYHERLSELKQLSNIDNYVNQKVLQELETLKIEEVIELKEIDQEIKSLRNEISKLKKSLKTDLENINQKFKKLKNKISLQMETTGLSEKKY

SEQ ID NO: 92168 - protein, 311 aa, Staphylococcus aureus COAS6020; identical to SEQ ID NO: 92150

SEQ ID NO: 92169 - protein, 202 aa, Staphylococcus aureus COAS6020
MNKLTIISLSILDNKEKKANKFEFSEKSNLIISERNGEGKSSLIKSIQYCLGSNLKAFPKGWDYKNYVFQLEIVIDKNKILIQRYNNIITVLDDGKIKKFGYLKDYSDWFQDKMEMNLKLVSKNKNTSSLASLEAILSPLYIDQDKSWDGILYKNSFEGLAQYKSQSFPKEVFEYYLGISNNIMNDKINKLNKYREKSKEKK

SEQ ID NO: 92170 - protein, 311 aa, Staphylococcus aureus M0413; identical to SEQ ID NO: 92154

SEQ ID NO: 92171 - protein, 441 aa, Staphylococcus aureus M0413; identical to SEQ ID NO: 92155

SEQ ID NO: 92172 - protein, 311 aa, Staphylococcus aureus M0486; identical to SEQ ID NO: 92154

SEQ ID NO: 92173 - protein, 441 aa, Staphylococcus aureus M0486; identical to SEQ ID NO: 92155

SEQ ID NO: 92174 - protein, 311 aa, Staphylococcus aureus UCIM6080; identical to SEQ ID NO: 92150

SEQ ID NO: 92175 - protein, 202 aa, Staphylococcus aureus UCIM6080; identical to SEQ ID NO: 92169

SEQ ID NO: 92176 - protein, 311 aa, Staphylococcus aureus subsp. aureus 21267; identical to SEQ ID NO: 92154

SEQ ID NO: 92177 - protein, 441 aa, Staphylococcus aureus subsp. aureus 21267; identical to SEQ ID NO: 92155

SEQ ID NO: 92178 - protein, 311 aa, Staphylococcus aureus subsp. aureus 21311; identical to SEQ ID NO: 92154

SEQ ID NO: 92179 - protein, 557 aa, Staphylococcus aureus subsp. aureus 21311
MNKLTIISLSILDNKEKKANKFEFSEKSNLIISERNGEGKSSLIKSIQYCLGSNLKAFPKGWDYKNYVFQLEIVIDKNKILIQRYNNIITVLDDGKIKKFGYLKDYSDWFQDKMEMNLKLVSKNKNTSSLASLEAILSPLYIDQDKSWDGILYKNSFEGLAQYKSQSFPKEVFEYYLGISNNIMNDKINKLNKYKEKSKEKKVKIEQVDSVYKNYSSQKNISKTIPKEFEEFKKQVDFYIKETDRFSQMITQKTDKLSKEKMKLDILQQDREELRKLLTKTKKRLSEVSYECTYCHSVLTRGQSLTRMELDDNKIEILLRKDSINQEIIKTENNIQKKLIEIQNLENQFELYHERLSELKQLSNIDNYVNQKVLQELEILKIEEVIELKEIDQEIKSLKNEISKLKKSLKTDLENINQKFKKLKNKISLQMETTGLSEKKVLNFNKLNGSGTFLNKDLLTLYLVYMNLLDSMEDFGLPFAIDSFVKNETDSIALEKMFGAIDKYFLTLNNQTFFSIIKENLKFIENPVNEIKIERPLLKEKFFSDIEKELIQNLNIL

SEQ ID NO: 92180 - protein, 311 aa, Staphylococcus aureus
MVRENGGANAQRGFNYQNCVISLVAIRNYKKPNFKIYVEADEDFEVNYGDDYHACIQVKGEKNLTFNKLLKGENGKLSIFEKNLSSGKSDSVYKIVVFSFSRKDMESMQEQIDEEELFSNSWLLSNDQKNKVNNDRVENFSLVKTAFDNDMKNARIYLKGELVQQNIVVEGRAEVILNELFQQILQKSEKKVQTEQDKELKKITSKELDLILQKITAKARFEKELKNLRFNSLKEEKIKKEEKKIILEYMAVKKAVIRFLKSDEEKLENSSINTLISETFNLSEMNCLSENTKYAIAISAYCDILEEIAYE

SEQ ID NO: 92181 - protein, 441 aa, Staphylococcus aureus
MNKLTITSLSILDNKEKKANKFEFSEKSNLIISERNGEGKSSLIKSIQYCLGSNLKAFPKGWDYKNYVFQLEIVIDKNKILIQRYNNIITVLDDGKIKKFGYLKDYSDWFQDKMEMNLKLVSKNKNTSSLASLEAILSPLYIDQDKSWDGNLYKNSFEGLAQYKSQSFPKEVFEYYLGISNNIMNDKINKLNKYKEKSEEKKVKIEQVDSVYKNYSSQKNISKTIPKEFEEFKKQVDFYIKETDRFSQMITQKTDKLSKEKMKLDILQQDREELRKLLTKTKKRLSEVSYECTYCHSVLTRGQSLTRMELDDNKIEILLRKDSINQEIIKIEKNIQKKLIEIQNLENQFELYHERLSELKQLSNIDNYVNQKVLQELETLKIEEVIELKEIDQEIKSLRNEISKIKKSLKTDLKNINQKFEKLKKKISLQIETTGLSEKKY

SEQ ID NO: 92182 - protein, 311 aa, Staphylococcus aureus MRSA_CVM43477; identical to SEQ ID NO: 92150

SEQ ID NO: 92183 - protein, 557 aa, Staphylococcus aureus MRSA_CVM43477
MNKLTIISLSILDNKEKKVNKFEFSEKSNLIISERNGEGKSSLIKSIQYCLGSNLKAFPKGWDYKNYVFQLEIVIDKNKILIQRYNNIITVLDDGKIKKFGYLKDYSDWFQDKMEMNLKLVSKNKNTSSLASLEAILSPLYIDQDKSWDGILYKNSFEGLAQYKSQSFPKEVFEYYLGISNNIMNDKINKLNKYREKSKEKKVKIEQVDSVYKNYSSQKNISKTIPKEFEEFKKQVDFYIKETDRFSQMITQKTDKLSKEKMKLDILQQDREELRKLLTKTKKRLSEVSYECTYCHSVLTRGQSLTRMELDDNKIEILLRKDSINQEIIKIENNIQKKLIEIQNLENQFELYHERLSELKQLSNIDNYVNQKVLQELETLKIEEVIELKEIDQEIKSLRNEISKLKKSLKTDLENINQKFKKLKNKISLQMETTGLSEKKVLNFNKLNGSGTFLNKDLLTLYLVYMNLLDSMEDFGLPFAIDSFVKNETDSIALEKMFGAIDKYFLTLNNQTFFSIIKENLKFIENPVNEIKIERPLLKEKFFSDIEKELIQNLNIL

SEQ ID NO: 92184 - protein, 311 aa, Staphylococcus aureus; identical to SEQ ID NO: 92154

SEQ ID NO: 92185 - protein, 543 aa, Staphylococcus aureus
MNKLTIISLSILDNKEKKANKFEFSEKSNLIISERNGEGKSSLIKSIQYCLGSNLKAFPKGWDYKNYVFQLEIVIDKNKILIQRYNNIITVLDDGKIKKFGYLKDYSDWFQDKMEMNLKLVSKNKNTSSLASLEAILSPLYIDQDKSWDGILYKNSFEGLAQYKSQSFPKEVFEYYLGISNNIMNDKINKLNKYKEKSKEKKVKIEQVDSVYKNYSSQKNISKTIPKEFEEFKKQVDFYIKETDRFSQMITQKTDKLSKEKMKLDILQQDREELRKLLTKTKKRLSEVSYECTYCHSVLTRGQSLTRMELDDNKIEILLRKDSINQEIIKTENNIQKKLIEIQNLENQFELYHERLSELKQLSNIDNYVNQKVLQELEILKIEEVIELKEIDQEIKSLKNEISKLKKSLKTDLENINQKFKKLKNKISLQMETTGLSEKKVLNFNKLNGSGTFLNKDLLTLYLVYMNLLDSMEDFGLPFAIDSFVKNETDSIALEKMFGAIDKYFLTLNNQTFFSIIKENLKFIENPVNEIKIERPLLKEKFF

SEQ ID NO: 92186 - protein, 311 aa, Staphylococcus aureus; identical to SEQ ID NO: 92154

SEQ ID NO: 92187 - protein, 557 aa, Staphylococcus aureus; identical to SEQ ID NO: 92179

SEQ ID NO: 92188 - protein, 311 aa, Staphylococcus aureus; identical to SEQ ID NO: 92154

SEQ ID NO: 92189 - protein, 541 aa, Staphylococcus aureus
MNKLTIISLSILDNKEKKANKFEFSEKSNLIISERNGEGKSSLIKSIQYCLGSNLKAFPKGWDYKNYVFQLEIVIDKNKILIQRYNNIITVLDDGKIKKFGYLKDYSDWFQDKMEMNLKLVSKNKNTSSLASLEAILSPLYIDQDKSWDGILYKNSFEGLAQYKSQSFPKEVFEYYLGISNNIMNDKINKLNKYKEKSKEKKVKIEQVDSVYKNYSSQKNISKTIPKEFEEFKKQVDFYIKETDRFSQMITQKTDKLSKEKMKLDILQQDREELRKLLTKTKKRLSEVSYECTYCHSVLTRGQSLTRMELDDNKIEILLRKDSINQEIIKTENNIQKKLIEIQNLENQFELYHERLSELKQLSNIDNYVNQKVLQELEILKIEEVIELKEIDQEIKSLKNEISKLKKSLKTDLENINQKFKKLKNKISLQMETTGLSEKKVLNFNKLNGSGTFLNKDLLTLYLVYMNLLDSMEDFGLPFAIDSFVKNETDSIALEKMFGAIDKYFLTLNNQTFFSIIKENLKFIENPVNEIKIERPLLKEK

SEQ ID NO: 92190 - protein, 311 aa, Staphylococcus aureus; identical to SEQ ID NO: 92154

SEQ ID NO: 92191 - protein, 290 aa, Staphylococcus aureus
MNKLTIISLSILDNKEKKANKFEFSEKSNLIISERNGEGKSSLIKSIQYCLGSNLKAFPKGWDYKNYVFQLEIVIDKNKILIQRYNNIITVLDDGKIKKFGYLKDYSDWFQDKMEMNLKLVSKNKNTSSLASLEAILSPLYIDQDKSWDGILYKNSFEGLAQYKSQSFPKEVFEYYLGISNNIMNDKINKLNKYKEKSKEKKVKIEQVDSVYKNYSSQKNISKTIPKEFEEFKKQVDFYIKETDRFSQMITQKTDKLSKEKMKLDILQQDREELRKLLTKTKKKIIRSKL

SEQ ID NO: 92192 - protein, 311 aa, Staphylococcus aureus subsp. aureus; identical to SEQ ID NO: 92150

SEQ ID NO: 92193 - protein, 204 aa, Staphylococcus aureus subsp. aureus; identical to SEQ ID NO: 92163

SEQ ID NO: 92194 - protein, 311 aa, Staphylococcus aureus subsp. aureus; identical to SEQ ID NO: 92150

SEQ ID NO: 92195 - protein, 204 aa, Staphylococcus aureus subsp. aureus; identical to SEQ ID NO: 92163

SEQ ID NO: 92196 - protein, 311 aa, Staphylococcus aureus; identical to SEQ ID NO: 92150

SEQ ID NO: 92197 - protein, 202 aa, Staphylococcus aureus; identical to SEQ ID NO: 92169

SEQ ID NO: 92198 - protein, 311 aa, Staphylococcus aureus; identical to SEQ ID NO: 92154

SEQ ID NO: 92199 - protein, 557 aa, Staphylococcus aureus; identical to SEQ ID NO: 92179

SEQ ID NO: 92200 - protein, 311 aa, Staphylococcus aureus; identical to SEQ ID NO: 92154

SEQ ID NO: 92201 - protein, 202 aa, Staphylococcus aureus; identical to SEQ ID NO: 92157

SEQ ID NO: 92202 - protein, 134 aa, Staphylococcus aureus
MNYFNKFFKSLKKKVQTEQDKELKKITSKELDLILQKITAKARFEKELKNLRFNSLKEEKIKKEEKKIILEYMAVKKAVIRFLKSDEEKLENNSISTLISETFNLSEMNCLSENTKYAIAISAYCDILEEIAYE

SEQ ID NO: 92203 - protein, 528 aa, Staphylococcus aureus
MIISERNGEGKSSLIKSIQYCLGSNLKAFPKGWDYKNYVFQLEIVIDKNKILIQRYNNIITVLDDGKIKKFGYLKDYSDWFQDKMEMNLKLVSKNKNTSSLASLEAILSPLYIDQDKSWDGILYKNSFEGLAQYKSQSFPKEVFEYYLGISNNIMNDKINKLNKYKEKSKEKKVKIEQVDSVYKNYSSQKNISKTIPKEFEEFKKQVDFYIKETDRFSQMITQKTDKLSKEKMKLDILQQDREELRKLLTKTKKRLSEVSYECTYCHSVLTRGQSLTRMELDDNKIEILLRKDSINQEIIKTENNIQKKLIEIQNLENQFELYHERLSELKQLSNIDNYVNQKVLQELEILKIEEVIELKEIDQEIKSLKNEISKLKKSLKTDLENINQKFKKLKNKISLQMETTGLSEKKVLNFNKLNGSGTFLNKDLLTLYLVYMNLLDSMEDFGLPFAIDSFVKNETDSIALEKMFGAIDKYFLTLNNQTFFSIIKENLKFIENPVNEIKIERPLLKEKFFSDIEKELIQNLNIL

SEQ ID NO: 92204 - protein, 311 aa, Staphylococcus aureus
MVRENGGANAQRGFNYQNCVISLVAIRNYKKPNFKIYVEADEDFEVNYGDDYHACIQVKGEKNFTFNKLLKGEKGKLSIFEKNLSSGKSDSVYKIVVFSFSRKDMESMQEQTDEEELFSNSWLLSNDQKNKVNNDRVENFSLVKTAFDNDMKNARIYLKGELVQQNIVVEGRAEVILNELFQQILQKSEKKVQTEQDKELKKITSKELDLILQKITAKARFEKELKNLRFNSLKEEKIKKEEKKIILEYMAVKKAVIRFLKSDEEKLENNSISTLISETFNLSEMNCLSENTKYAIAISAYCDILEEIAYE

SEQ ID NO: 92205 - protein, 202 aa, Staphylococcus aureus; identical to SEQ ID NO: 92157

SEQ ID NO: 92206 - protein, 311 aa, Streptococcus oralis
MVKDNGGSIAQKGFNYQNCVISLVAIRNYNKSNFSIYVETDEDFEVTYDDSYHAYIQVKGQKNMSLKKLLQETKERPSIFEKNLSSGTSDSIYKIVVYNFKESDLKEMQEQIDTEELFSSSWLLSDNQKKEVNNPKVDNFALVKTAFDNNIINAKTFLKGEMANQRVSIDNRDDVIINELLQQIVQKSEKEVHTIADKELKKITSEELNLILQKVTAKARFDKELDKFGFTEIKNEKIKKEEKKIILEYITAKKSVVNFLNSDKNSLENESVTTLIPKTFMLSEMGTLSENSRYAVGISAYCDILEGIANE

SEQ ID NO: 92207 - protein, 436 aa, Streptococcus oralis
MRLELVNKSSDKASLASVEALFSPMYIDQDKAWDGKLFKDSFESLGRYKSNDFPKNVFDYYLGISDSQIVDKESKKNEYLRQLELVNGRINQVQSVYKTYRTKNKITETVPKDFKDLQKELDFYITETDKFSIKITDKTGELSKEKINLDILNQDLEELKKLSSKIKERFSEIRHECVYCHSILTRQQSLTRLELEDNELAIKSRIDSISQQIMKSKRIVQEKEEAIKQLQEQFNQYHERLTELKQLSDIDEYVNQNVLSELKKLEIQETSEKSNLDKLIGDITKEIRMLKKELNQRAKTIEGDYEALKNELSILIGSTGITDKKFRNFDKLKGSGTNLNKDLLVIFLVYMNLIDSKSITSLPFAIDSFVKNETDEKVLKKMFDAINSKFLSLKSQTFFSIIRDNLKYVDSKVNQVNIESPLLKREYYSDLSKEII

SEQ ID NO: 92208 - protein, 313 aa, Streptococcus suis
MVADNGGANAIKGMNYQNAVISLVAIRNYEKEGFELILEADDDFEVLYDNYHAYIQVKGEQKMSLSKMLNQKKEGGKKKKSMLDKHFEVGDSKSTYKFVVYNFTQSDLDKMKETDDELFNSSLKLSKAQEKRINNSKTKRFSIIKTPFEKNMLEAQNYLLGEMANSGIAVDNRVNQVLGELTTIIYRKSEYTIKEESDKKYKKLVSKELKDILLKVSAMEMFDEIVKDLPYTPLKKSRIKTEKLKISTQQTFLKQSVIEYIQSNLYSELEDLTVEDLINRCIELDMFSNVDNNMRIALIVSSYCDIIEEITFG

SEQ ID NO: 92209 - protein, 558 aa, Streptococcus suis
MVNFIIKSLVIIDYESQKANKFNFGAHANLIVSATNTTGKSSILKSLYYALGVSLKSIPDKWDIDNYIFQIIIKIDEVEYTIERHNKIMSVKDNGEVIIFKDFKEYSTWLQNVLKMNLTLVNSRNDNFSHAYASAIFAPIYIDQDSSWDGVLYKNTFNDLGQYKSPNFQKDVVAYYLGLADTELKEYQQKKTEIKQQLNYKKISIDEITNVYNGYKEKFDVSENVTSNVSDLENQVNEFINETNKLSMAISKSLKKISKYTEELDIEKQDEAELTKIITAINERLEKIDYECSYCHSKLTREQSLTRLELNDDLSEIHVKESEIKQKILILEDNVGKERSYLQSLNQKFVTYKERISEINEILTIKDYVNQKVLKELGDLRRQEDNQYSMLKRTDDDLSKSIRMIQAELRKTRSALSTEFEILKNNITKDVRTTGITNREFGDFSKVSGSGTEHNKSLLSLYLIYFQLISKNSAYKFPMTIDSFTKNELDEISEENMYKAIREYFLTIPNQTFFAIIKDNLKYIDCPDANVIEVEKPILLSEKYKELSEKLFAYTEKN

SEQ ID NO: 92210 - protein, 318 aa, Streptococcus mutans SM1
MKERKKYMAKDNGGAIAQKGFNYQNYVVSLVAIRNYKKPNFSIYVEADEDFEVMYDDDYHACIQVKGQKGMSIKKLLSTTNNKPSIFEKNLSSGTNDSKYKIVVYNFNEEDLKEMQEQIDTEELFHSSWLLSDSQKNKVSNPRTKNFSLVKTDFDKNTSAARTFLKGELANQKISIDNRDDVILDELLQQIIQKSEKEIHSDADKELKKITSEELNLILQKITAKARFDKELKKFGFTSIKNEKIKREEKKIILEYMTAKKAVISFLKSDEDRLENEEMTILIPKSFDLSEMQTLSENSKYAIGVSAYCDILEGIANE

SEQ ID NO: 92211 - protein, 552 aa, Streptococcus mutans SM1
MNKLVIKSLLIVDYENKKANKFRFSDSANLIVSSTNGEGKSSLVKSIYYALGANLKSFPKGWNNSDYIFQLEVSIDDKDFLIKRHNKVISISDNGRVQVFENFKEYSSWFQKKLGMNLELVSKNSDTPSLASVEALLSPMYIDQDKSWDGKLFKDSFEGLGRYKPSDFPKNVIDYYLKTFDSKILDKESEKNEYSKQLDLVNGKITQIQSVYETYRSQKNVTETVPKDFEELKKELDFYIRETDKFSKEITKKTSELSEEIVNLDILQQDLEELKKLSSKTKKRFSNIKHKCVYCHSVLTREQSLTRLELADNELAISVRMDEISQQIDKSERKVQEKEGAIERLEEQFYQYHERLAELKQLSNIDEYVNQNVLSELKKLEIQENLEKIKLDSNISELKKEVIKLKKEFNQRAKEIEGEYEELKNELSVQIGSAGITDKKFRNFDKLKGSGTNLNKDLLTIFLVYMNLIDSKSNISLPFAIDSFVKNETDEKVLEKMFSAIDTKFLNLKSQTFFSVIEENLRYVSPNINQVKISKPLLRDDLYKKLETEVIQ

SEQ ID NO: 92212 - protein, 311 aa, Streptococcus mutans 2VS1
MAKDNGGAIAQKGFNYQNCVVSLVAIRNYKKPNFSIYLEADEDFEVTYDDNYHAYIQVKGQKSMSIKKLLSTTNNKPSIFEKNLSSGTDDSIYKIVVYNFNEKDLKEMQEQTDTEELFQSSWLLSDSQKDQVNNPRTDNFSLVKTAFDNNINDARTFLKGELANQNISIDDRDDIILNELLQQIVQKSEKERQTEADKELKKITSEELNLILQKVTAKARFDKELDKFGFTEIKNEKIKKEEKKIILEYMTTKKAVINLLKNDENSLENEEITTLIPKTFTLSEMQTLSENSKYAISISAYCDILEGIANE

SEQ ID NO: 92213 - protein, 552 aa, Streptococcus mutans 2VS1
MSRLIIKSLLIVDYKNEKANKFVFSDSANLIVSSTNGEGKSSLVKSIYYALGANLKSFPKDWNVDNYIFQLEVLIDGKKFWTKRHNKVISISDNGKVQLFENFKEYSTWLQKKLGMNLELVNKNSDKPSLASVEALLSPMYIDQDKSWDGKLFKDSFESLGQYKSNDFPKNVFDYYLGISNSQITDKESEKNEYLKQLELVNGKITQVQSVYETYRSQKNITETIPKDFEGLKKELAFYIQETNRFSKEITKKTEELSKEKIKLDIFKQDLEELKKLSSKTKKRFSEIKHECVYCHSILTREQSLTRLELEDNELAISIRKDSVFQQIMKSERVVQENKEAIEQLQEQFNQYHKRLAELKQLSDIDEYVNQNVLSELKKLEIQESDEKAKLDTLISELAKEIRKLKKELNQRAKEIEGEYEELKNELSIQIGSVGIIDKKFRNFDKLKGSGTNLNKDLLILFLVYMNLVDNKSNFGLPFAIDSFVKNETDTKVLEKMFGVINSKFLSLKNQTFFSIIEENLKYIDSKVNEVKINKPLLRDDLYKKLEIEVIQ

SEQ ID NO: 92214 - protein, 311 aa, Streptococcus agalactiae GB00226
MAKDNGGAIAQKGFNYQNCVVSLVAIRNYKKPNFSIYVEADEDFEVMYDDDYHAYIQVKGQKGMSIKKLLSTTNNKPSIFEKNLSSGTDDSKYKIVVYNFNEKDLKEMQEQIDTEELFYSSWLLSDSQKNKVSNPKTKNFSLVKTDFDNNISAARTFLKGELANQKISIDNRDDVILDELLQQIIQKSEKEIHSDADKELKKITSEELNLILQKITAKARFDKELKKFGFTSIKNEKIKREEKKIILEYMTAKKAVISFFKSDEDRLENEEMTILIPKSFDLSEMHTLSENSKYAIGISAYCDILEGIANE

SEQ ID NO: 92215 - protein, 553 aa, Streptococcus agalactiae GB00226
MNKLVIKSLLIVDYENKKANKFRFSDSANLIVSSTNGEGKSSLVKSIYYALGANLKSFPKGWNNSDYIFQLEVSIDDKDFLIKRHNKVISISDNGRVQVFENFKEYSSWFQKKLGMNLELVSKNSDTPSLASVEALLSPMYIDQDKSWDGKLFKDSFEGLGRYKPSDFPKNVIDYYLNISDSKILDKESEKNEYSKQLDLVNGKITQIQSVYETYRSQKNVTETVPKNFEELKKELNFYIRETDKFSKEITEKIGELSKERIKLDILQQDLEELKKLSSKTKKRFSNIKHECVYCHSILTREQSLTRLELADNELAINVRMDEISQQIDKSERKVQEKEGAIERLEEQFYQYHERLAELKQLSNIEEYVNQNVLSELKKLEIQENLEKTKLDSNISELKKEVIKLKKELNQRAKEIEGEYEELKNELSVQIGSAGITDKKFRNFDKLKGSGTNLNKDLLTFFLVYMNLIDSKSNISLPFAIDSFVKNETDEKVLEKMFSAINTKFLNLKSQTFFSVIKDNLKYIDSRVSQVNIESPLLKSEYYDRLSKEIIKS

SEQ ID NO: 92216 - protein, 311 aa, Streptococcus agalactiae GB00899; identical to SEQ ID NO: 92214

SEQ ID NO: 92217 - protein, 553 aa, Streptococcus agalactiae GB00899; identical to SEQ ID NO: 92215

SEQ ID NO: 92218 - protein, 311 aa, Streptococcus agalactiae BSU165; identical to SEQ ID NO: 92214

SEQ ID NO: 92219 - protein, 553 aa, Streptococcus agalactiae BSU165; identical to SEQ ID NO: 92215

SEQ ID NO: 92220 - protein, 311 aa, Streptococcus agalactiae CCUG 91; identical to SEQ ID NO: 92214

SEQ ID NO: 92221 - protein, 553 aa, Streptococcus agalactiae CCUG 91; identical to SEQ ID NO: 92215

SEQ ID NO: 92222 - protein, 311 aa, Streptococcus agalactiae; identical to SEQ ID NO: 92214

SEQ ID NO: 92223 - protein, 553 aa, Streptococcus agalactiae; identical to SEQ ID NO: 92215

SEQ ID NO: 92224 - protein, 311 aa, Streptococcus agalactiae; identical to SEQ ID NO: 92214

SEQ ID NO: 92225 - protein, 553 aa, Streptococcus agalactiae; identical to SEQ ID NO: 92215

SEQ ID NO: 92226 - protein, 311 aa, Streptococcus agalactiae; identical to SEQ ID NO: 92214

SEQ ID NO: 92227 - protein, 553 aa, Streptococcus agalactiae; identical to SEQ ID NO: 92215

SEQ ID NO: 92228 - protein, 311 aa, Streptococcus agalactiae; identical to SEQ ID NO: 92214

SEQ ID NO: 92229 - protein, 553 aa, Streptococcus agalactiae; identical to SEQ ID NO: 92215

SEQ ID NO: 92230 - protein, 311 aa, Streptococcus agalactiae; identical to SEQ ID NO: 92214

SEQ ID NO: 92231 - protein, 553 aa, Streptococcus agalactiae; identical to SEQ ID NO: 92215

SEQ ID NO: 92232 - protein, 311 aa, Streptococcus agalactiae; identical to SEQ ID NO: 92214

SEQ ID NO: 92233 - protein, 553 aa, Streptococcus agalactiae; identical to SEQ ID NO: 92215

SEQ ID NO: 92234 - protein, 311 aa, Streptococcus agalactiae; identical to SEQ ID NO: 92214

SEQ ID NO: 92235 - protein, 553 aa, Streptococcus agalactiae; identical to SEQ ID NO: 92215

SEQ ID NO: 92236 - protein, 311 aa, Streptococcus agalactiae; identical to SEQ ID NO: 92214

SEQ ID NO: 92237 - protein, 553 aa, Streptococcus agalactiae; identical to SEQ ID NO: 92215

SEQ ID NO: 92238 - protein, 311 aa, Streptococcus pneumoniae
MAKDNGGAIAQKGFNYQNCVISLVAIRNYNKSNFSIYVETDEDFEVTYDDSYHAYIQVKGQKNMSLKKLLQETKERPSIFEKNLSSGTSDSIYKIVVYNFKESDLKEMQEQIDTEELFYSSWLLSDNQKKEVNNPKVDNFALVKTAFDNNIINAKTFLKGEMANQRVSIDNRDDVIINELLQQIVQKSEKEVHTIADKELKKITSEELNLILQKVTAKARFDKELDKFGFTEIKNEKIKKEEKKIILEYITAKKSVVNFLNSDKNSLENESVTTLIPKTFMLSEMGTLSENSRYAVGISAYCDILEGIANE

SEQ ID NO: 92239 - protein, 551 aa, Streptococcus pneumoniae
MSRMTIKSLLIADYENEKANKFVFSDSANLIVSSTNGEGKSSLVKSIYYSLGANLKSFPKGWNADNFIFQLEVFIDGNEFLIKRHNKVISVLDNNEVKLFENFAEYYLWFQEKLKMRLELVNKSSDKASLASVEALFSPMYIDQDKAWDGKLFKDSFESLGRYKSNDFPKNVFDYYLGISDSQIVDKESKKNEYLRQLELVNGRINQVQSVYKTYRTKNKITETVPKDFKDLQKELDFYITETDKFSIKITDKTGELSKEKINLDILNQDLEELKKLSSKIKERFSEIRHECVYCHSILTRQQSLTRLELEDNELAIKSRIDSISQQIMKSKRIVQEKEEAIKQLQEQFNQYHERLTELKQLSDIDEYVNQNVLSELKKLEIQETSEKSNLDKLIGDITKEIRMLKKELNQRAKTIEGDYEALKNELSILIGSTGITDKKFRNFDKLKGSGTNLNKDLLVIFLVYMNLIDSKSITSLPFAIDSFVKNETDEKVLKKMFDAINSKFLSLKSQTFFSIIRDNLKYVDSKVNQVNIESPLLKREYYSDLSKEII

SEQ ID NO: 92240 - protein, 311 aa, Streptococcus pneumoniae; identical to SEQ ID NO: 92238

SEQ ID NO: 92241 - protein, 551 aa, Streptococcus pneumoniae; identical to SEQ ID NO: 92239

SEQ ID NO: 92242 - protein, 311 aa, Streptococcus pneumoniae; identical to SEQ ID NO: 92238

SEQ ID NO: 92243 - protein, 551 aa, Streptococcus pneumoniae; identical to SEQ ID NO: 92239

SEQ ID NO: 92244 - protein, 311 aa, Streptococcus pneumoniae; identical to SEQ ID NO: 92238

SEQ ID NO: 92245 - protein, 551 aa, Streptococcus pneumoniae; identical to SEQ ID NO: 92239

SEQ ID NO: 92246 - protein, 311 aa, Streptococcus pneumoniae; identical to SEQ ID NO: 92238

SEQ ID NO: 92247 - protein, 551 aa, Streptococcus pneumoniae; identical to SEQ ID NO: 92239

SEQ ID NO: 92248 - protein, 311 aa, Streptococcus pneumoniae; identical to SEQ ID NO: 92238

SEQ ID NO: 92249 - protein, 551 aa, Streptococcus pneumoniae; identical to SEQ ID NO: 92239

SEQ ID NO: 92250 - protein, 311 aa, Streptococcus pneumoniae; identical to SEQ ID NO: 92238

SEQ ID NO: 92251 - protein, 551 aa, Streptococcus pneumoniae; identical to SEQ ID NO: 92239

SEQ ID NO: 92252 - protein, 311 aa, Streptococcus pneumoniae; identical to SEQ ID NO: 92238

SEQ ID NO: 92253 - protein, 551 aa, Streptococcus pneumoniae; identical to SEQ ID NO: 92239

SEQ ID NO: 92254 - protein, 336 aa, Bacillus cereus AH603
MTEIKKIQQFDNGGAEAIKGFNFQKANLILLSINNYQKKDFKIYIEAEDDIVVSYENYRAFIQVKKQKHTFSTITKQEQKLIKAPEGKKSKKLLPSILEKNLNSGTEDDTFKIFVKEIGSTDKKQLNIKKPGAICSELYELSDTAKAKLIKALPSELTNKIENFYLYVSPIHENLDEAAKYLTGCLNEIDVSVDNNRGRAIIAELSLTIDQKAQEIIFDELHKELKSIDGDYLSKILVTCKALNEFESILESLSYNALLKKQIKSERLKIELNKTNLKADMKQAIIDYIEKNEDLETISNKDIVNYLVKTFTFTESKKSTLISVAIESLCELGDEL

SEQ ID NO: 92255 - protein, 339 aa, Bacillus cereus AH603
MIIESIIIYDYINQRIKKFNFDPRTNIFVSELNTVGKSSLIKSIYHCLGYSIKIWPSNWNINNMVFQLEVTNGDRKHLITRHKNLFYIDDRKEILTEKEYSMWLQNFLNIHIKIKDKKSKLLSDVYASEILLPFYVDQDKSWNGFVYSKSSDSFARYNNTVKNVFDFYFEIANKTLIDLAIEKSRIEMELSDTHKKRDALHLLENEHSAFSKPVNVINIIDKDKINISQTNNYLQMVNSLNKSVADIDNDIIDLETKINEISREITELNKLNKSYNKKFNEIKYACIYCNSKLTHEQSLTRLKIRNNQYEIVEQLDNNKRLKEEYKYNKEEKIFKKINY

SEQ ID NO: 92256 - protein, 336 aa, Bacillus cereus
MTEITEIQEFDNGGAEAIKGFNFQKANLILLSINNYQKNDFKIYIEAEDDIVVSYESYRAFIQVKKQKHTFASITKQEKKVSKDSDGKKIIKFLPSILEKNLKSGTEEDIFKVFVKEIGQTDKKQLNIKKPGAVCSELYELSDKAKTTLIKALPNALVNKIENFYFFISPIHEDLNEAEKYLIGCLNGIDVSVDNNRGRAIIAELSLTIDQKAQEVIFDEVNKELKLIDGDYFSKVLVTCKSLNEFDNILESLGYNALLKKQIKNERLKIELNKTDLKEDMKQAITDYIDRTEDLENISNKDIVNYLVQRFISTDSKKSTLISVAIEGLCELGDEE

SEQ ID NO: 92257 - protein, 558 aa, Bacillus cereus
MIINSIIIYDYIDKRIKKVDFSPQTNIFVSELNTVGKSSLIKSIYHCLGYSIKTWPSNWNSDNMVFQLKVTNGDREHQITRHKNLFYIDDRQEILTEKEYSIWLQNFLNICIKIKDKKNKLLSDVYASEILLPFYVDQDKSWNGFVYSKSSDSFARYNNTVKNVFDFYFEIANKTLIDLEIEKSNVEAELSNTHKKIEALNLLENEHSAFSKPVNVINIIDNDRIDEFQIDNYLKMISSLNKFVADIDNSIIELETKINQVSREITELNKLKKSYNSKFNEIKYACIHCNSKLTHEQSLTRLKIRNNQYEIVEQIEKNKRLKEVYEFSKKEKTAEKDKLLNKILETERILQNNKEYSELDSYIADRVNQEITNNYITVEQTLFNEEYEKVDSIKKVNKEISREKKLGNQQRSEIKKKYEELINEYERYFKGIKLDDIKFFSFKEVTGSGIDANKKMLALYTIYANLLDEYSSIRVPFAMDSFIKNETAAELKEQMFGFLSKYYFSIEGQMFFSIINENVKYLDQENKYNFINLEKPILEEINENNKILVKTFEIIDKK

SEQ ID NO: 92258 - protein, 320 aa, Bacillus atrophaeus
MSEFENGGAVAIKGFNFQKAAISLIAIKNYHKPNFHIFVEAKDDFEVKYDGYEAYIQVKSKKLSLNQLLNTKDGKSILEKNLSNGNKNSYFKIFVKSFAETDIKKMIELSEGNICTPLYSYNDEQKKSILDELKNSEKIEEFEDKLLSSYIYIPPFKDKLAEAIPVLLGEMALNEIDVSHKRGQIAVNELFTLIDQKSEYIVKSEEDFQKKAILKEDLKKVFKLSSTLDAFDELLESTLDSFFLKKQIKKEQLKITHFYSIEKKAAQEKLIGFDLFSGTEDEVIKNAVRICNKSKEFLSLNDPSKKAIVIEVLAEMSEGL

SEQ ID NO: 92259 - protein, 554 aa, Bacillus atrophaeus
MIIERLIILDYENEVANEFNFSKNVNVITSDGTTVGKSSLIKSLYYALGFEIKQFPHGWNFKTMRFRLDVQINESAYFIIRDNSLFYVSDSEGALTLTEFSEWLQQKLSVNMMLKLRNSTTNELSSVYATEILTPFYLDQDKSWNGYIFKNTSDSLGRYSNIPQDILEYVLGISNKEILEKETEKGNNQKQVNQITSKINVLNSLQEEYAEQTEMIDSSPYDIDELKVTFNNHLKQLSRVSKEISNKKNKMLSLKANQDLNSQDNVELEKILKVNKKTYKEVELECVHCHSKLTLEQSLTRLKLKNNLLEIQNMLDSNRKENEKLQLGIEELQTEIKDLSSNYVILTQQKKEIQNILSLQKFIDLESKRLANEEFLKVIDNLNTNKTNIEELIKRLAKEIRELKKDQKERKAEISKKYNEILSDINFRFGSTKLSEVEFFNFKEVKGSGMDNNKTLLALYITYMRLVAEYGIYTIPFGIDSFVKNEIDEATVPITFKEVERYVLSNSNQTFFATISENLKYLSNLDTYNIMKLTKPLLNKVNYKKMLSQVSYIK

SEQ ID NO: 92260 - protein, 312 aa, Listeria grayi DSM 20601
MRFDNGGAIAQKGFNYQNAVISLVAIRNYKKPNFEIYVEASEDFEVQYDGNYHAYIQVKGTKSMSLKKLLSKSKLKSGGEKPSIIEKNLNSGGSEDKYKIVVYHFTENDLKRMQEQQNEEELFEKSYLFSDGQKKQINHPNADNLSLICTNFKNDKINARTYLKGEMADQNISIDGKSDILLDHLDRIISEKAEFILKKEDDRNFKRISAEELNPILQKTIALEKFGVILSKFDFNEYKKAKINLEKNKIVLEYVYLRNKVVEKLKLLDLDNLPEVEAISEVMKLAESQKLDEITSYAVCISAYCDVIEGVS

SEQ ID NO: 92261 - protein, 552 aa, Listeria grayi DSM 20601
MKLVIKEIIIFDYNNQKANRFSFQPGSNLITSNSNEAGKSSLIKSIYYTLGARVSTFPTGWEYKKYIFQIKIFINDKEVIIKRQDEIFTVQHDGKKEIFSNEKDFATWFQNQVGMQMKLQEQKSSKVSIAYMNAILTPYFIDQDKSWSSFYKNAIDKVGMYKNQPKVIFENILGVSDVELQNLEFERAQAIKLKEDLVSKISQVDSVYKNYQIQKQVTKAAPENIDSLKEEISDYLKITDELSNEIEKYTEKLSKNKISVDINCQDLDELKKLLSKTDKRYKEVAFECTYCHSLLTKEQSLTRLTLSDNDFEIRGRVHELNHKIELGKSELNSIELEIEKLKTSYSEYNLKIKDLKSAVKIEDFVSQKVLSELNGLKIQQNKEKSVVESSILEYTKEINPLRKELKKKKTILNENFEILKNSVSTEVGTSNLHNRKFLDFSAIEGGGTAMNKDFLVLYLTYSKMIDKYSEFKFPLAMDSFIKNEITDLNESKMFEAVQKHFIDLDIQTFFSVINKNLSHLDTSHSYAVKISKPILNDENYIYLQSQIIEIDD

SEQ ID NO: 92262 - protein, 311 aa, Streptococcus mitis
MAKDNGGAIAQKGFNYQNCVISLVAIRNYNKSNFSIYVETDEDFEVTYDDSYHAYIQVKGQKNMSLKKLLQETKERPSIFEKNLSSGTSDSIYKIVVYNFKESDLKEMQEQIDTEELFSSSWLLSDNQKKEVNNPKVDNFALVKTAFDNNIINAKTFLKGEMANQRVSIDNRDDVIINELLQQIVQKSEKEVHTIADKELKKITSEELNLILQKVTAKARFDKELDKFGFTEIKNEKIKKEEKKIILEYITAKKSVVNFLNSDKNSLENESVTTLIPKTFMLSEMGTLSENSRYAVGISAYCDILEGIANE

SEQ ID NO: 92263 - protein, 552 aa, Streptococcus mitis
MSRMTIKSLLIADYENEKANKFVFSDSANLIVSSTNGEGKSSLVKSIYYSLGANLKSFPKGWNADNFIFQLEVFIDGNEFLIKRHNKVISVLDNNEVKLFENFAEYYLWFQEKLKMRLELVNKSSDKASLASVEALFSPMYIDQDKAWDGKLFKDSFESLGRYKSNDFPKNVFDYYLGISDSQIVDKESKKNEYLRQLELVTGRINQVQSVYKTYRTKNKITETVPKDFKDLQKELDFYITETDKFSIKITDKTGELSKEKVNLDILNQDLEELKKLSSKIKERFSEIRHECVYCHSILTRQQSSLTRLELEDNELAIKSRIDSISQQIMKSKRIVQEKEEAIKQLQEQFNKYHERLTELKQLSDIDEYVNQNVLSELKKLEIQETSEKSNLDKLIGDITKEIRMLKKELNQRAKTIEGDYEALKNELSILIGSTGITDKKFRNFDKLKGSGTNLNKDLLVIFLVYMNLIDSKSITSLPFAIDSFVKNETDEKVLKKMFDAINSKFLSLKSQTFFSIIRDNLKYVDSKVNQVNIESPLLKREYYSDLSKEII

SEQ ID NO: 92264 - protein, 147 aa, Bacillus thermoamylovorans
MLLNSEGNICDPLYSYSDEQNQTILNTLKGSSDIEDFEKKLLASYIYILPFEDRLIDAIPALLGQMALKEIDVSHKRGQIAINELFTLIDQKSEYVVESDEDYVKKKILKEDLQEIFRLTSTLDFFDSILSSTSYSVFLKKRLKKSN

SEQ ID NO: 92265 - protein, 116 aa, Bacillus thermoamylovorans
MIIEKIIILDYENRVANEFEFSKGPNIITSDGTTVGKSSLTKSLYYALGFEIKQFPHGWDVKTMRFRIDILINGLSYSIIRNNALFYVSDKEGVLNLKEFSEWCKRAHYFSLSFSN

SEQ ID NO: 92266 - protein, 320 aa, Bacillus sp. NRRL B-14911
MSDFENGGAVAIKGFNFQKAAITFIAIKNFDKPNFHILVEAKDDFEVKYDGYEAYIQVKSQKLSLKKILNSKEGKSILEKNLRNGNEDSFFKIFVKTFVESDLKSMTEVSDGNICTPLYSYSDDQRKTILQELKDKENIHKFEEKLLSSYIYIPPFKDKLNEAIPVLLGEMALKEIDVSNKRGQVAINELFTLIDQKSEYIVKSEEDYKKKEILKGDLREIFKLSSTIDAFDNLLESTSYNFFLKKQVKKEQLKIMHLYSTEKNIAKQELEDLVAFTGTEDEIINNAILKCNNNKKFNSLNETSKKAIIIEVLSEMSEII

SEQ ID NO: 92267 - protein, 554 aa, Bacillus sp. NRRL B-14911
MIIEKLIILDYESEVANEFHFSKNTNVITSDGTTIGKSSLIKSLYYALGYDIKQFPNGWNYKTMRFRLDVIINGSSYYIIRNNSLFYVTDSEEALDLKEFSEWLQGKLSIEMKLKLKSSSTKELSSAYSTEILTPFYLDQDKSWNGYIIKNSSDSLGRYSNIPGDILEYTLGISNRAILEKENEKTKNQKQINQYSSKIDVLNSLQTEYSDKVEMIDTSPYEFDKLKETFDITLNQLSRISNEISSKKKKIFAKKAEQDINNQDNIELEKIKAVNKKNYKDVEFECIHCHSHLTLEQSLTRLKLNNNVLEIQNMLDMNKKQSEVLQQEIEVLQDEILDLDSKYRMITRKKKEIQEILTLQEFIDLESKRLANEEFLKTIDKLSDEKEKLVDYGKELAKKINALKKDQKNRKSEIEKRFYEIINDINLRIGSTILSEVEFFNYREVKGSGMDNNKTLLALYLTYMRLIAEFGIYTIPFGIDSFVKNEVDKKTIKTTFKEVEKYFLTIPSQTFFVTISENLQYLSKLDNYNVIKLTKPILHKNKYNYLLSQVRTID

SEQ ID NO: 92268 - protein, 311 aa, Streptococcus gallolyticus subsp. gallolyticus ATCC 43143
MAKDNGGAIAQKGFNYQNCVVSLVAIRNYKKPNFSIYVEADEDFEVMYDDNYHAYIQVKGQKGMSIKKLLSTTNNKPSIFEKNLSSGTDDSKYKIVVYNFNEEDLKEMQEQIDTEELFHSSWLLSDSQKNKVSNPRTKNFSLVKTDFDKNTSAARTFLKGELANQKISIDNRDDVILDELLQQIIQKSEKEIHSDADKELKKITSEELNLILQKITAKARFDKELKKFGFTSIKNEKIKREEKKIILEYMTAKKAVISFLKSDEDRLENEEMTILIPKSFDLSEMRTLSENSKYAIGVSAYCDILEGIANE

SEQ ID NO: 92269 - protein, 554 aa, Streptococcus gallolyticus subsp. gallolyticus ATCC 43143
MNKLVIKSLLIVDYENKKANKFRFSDSANLIVSSTNGEGKSSLVKSIYYALGANLKSFPKGWNNSNYIFQLEVSIDDKDFLIKRHNKVISISDNGRVQVFENFKEYSSWFQKKLGINLELVSKNSDTPSLASVEALLSPMYIDQDKSWDGKLFKDSFEGLGRYKPSDFPKNVIDYYLNISDSKILDKESEKNEYSKQLDLVNGKITQIQSVYETYRSQKNVTETVPKNFEELKKELNFYIRETDKFSKEITEKIGELSKERIKLDILQQDLEELKKLSSKTKKRFSNIKHECVYCHSILTREQSLTRLELADNELAINVRMDEISQQIEKSERKVQEKEGAIERLEEQFYQYHERLAELKQLSNIEEYVNQNVLSELKKLEIQENLEKTKLDSNISELKKEVIKLKKELNQRAKEIEGEYEELKNELSVQIGSAGITDKKFRNFDKLKGSGTNLNKDLLTIFLVYMNLIDSKSNISLPFAIDSFVKNETDEKVLEKMFSVINTKFLNLKSQTFFSVIKDNLKYIDSRVSQVNIESPLLKSKYYDRLSKEIIKSE

SEQ ID NO: 92270 - protein, 316 aa, Streptococcus gallolyticus
MVKDNGGAIAQKGFHFQNHVISLVAIRNYKKKNFSIYVEADDDFEVLYDDDYHAYIQVKGQANMSLSKLLNSQNAKPSIMEKNLKVGDDQSIYKIVVFEFATKDLNSMQYDNDELFSQSIKLCESQKNKVEKALGNDVSSKLANFSIVKTDFSNDSKVARKYLKGELVDQKISVDNRDDVILDELDRLISQKSEFILKSDKDKSFKQITSTELDSILWKISSKARFEKELSNFSFPTFREEKIKKEELKIIVQYMSEKKAIIKELSADISRLNEKSLVEILPDIEKSNCLSGLEANTKYAIIISAYCDILEEIVNE

SEQ ID NO: 92271 - protein, 554 aa, Streptococcus gallolyticus
MSNLIVNKISIVDYENKVANTFDFSPKANLIISKSNGQGKSSLVKSIYYGLGADLKSFPNGWEPEKFIYQLEVTIGEQDYKIKRQNKIISIRGEKESVIFKNRKEYSKWLQEKLEMSLELATRNSELSIAYCGAILSPFYIDQDKGWSGSLYKDTFEGLGQYNATVFPRDVVDYYLNLSSSELNIKKSHNEKLKNKNKFLQGKIEQIQAVYNTYEEQNQVNASYPIDIKELQLEMEQYLRETDEISERIQKITKEIEKNKLKLDILKQDKEEISNLLNDTDERFNEIEYECSYCHSILTREQSLTRLELEDNRITIISKKEELTVKIKQAEETLQSSQRQVDSLKEKIDLYHKRVKEIRSVTDIESYISQSVLSELNSLRVQEALQKDILDKEMKQVSADIRKLQRILKENTESIQGEFEQLKNKLSNLIGSNGLADRKFRDYKKMTGGGTNLNKDLLALYLTYMNLIIDRTKFKLPLAIDSFVKNETDSDSLLKMFEAINSSFLTLDSQTFFSVIEENLVYLDKSTNQIQIESPLLRKEYYSRVVSEIIEFEK

SEQ ID NO: 92272 - protein, 320 aa, Bacillus infantis NRRL B-14911; identical to SEQ ID NO: 92266

SEQ ID NO: 92273 - protein, 554 aa, Bacillus infantis NRRL B-14911; identical to SEQ ID NO: 92267

SEQ ID NO: 92274 - protein, 330 aa, Lactobacillus crustorum JCM 15951
MADNNGGAVAIKGFNFQTMAVIFFIVNNIDDDKFSAYVESEEDFTLDKNGYKSYVQVKARKLSLKLLLKTALKDSGDIEPSILEKNLSSADDGEFLIYTKELAAKDLKSMIKKSDIFVNEEDVYVFSEEQKKSIVDAFKKDGFGESLIKNLNNSRLFVSKFGDSLKDSQRYLIGLMSEKKIDITGDRAKMALNELFFLVHKKAEYLVQKGYEKDDYEKKKLTSDELKSIFKKAESRSFFYKFVEDTNYSTLFKDKVTKIRNEIFNEYYVERKMLNTIFDSQKLDFDCPNQDLINKMKLELDSDKDKFDNCDKYVKVSLIIDYISERAVQS

SEQ ID NO: 92275 - protein, 517 aa, Lactobacillus crustorum JCM 15951
MRKLIIRELKILDYKNEVAQTFDFSDEINIIVSKISSTGKSSLIKSIFYALGFDIKQFPNKWNTENMIFKEYVTIDGVEHSILRKGNLFNVDNNTETYSYSQYSKWLASQMNIDVKLQIQNTGKFTDPYPTEMLLFNYIDQDKSWDGFLYKNVSDSLKQYGGSNAVRGILEYELGISDNDVSESKEKKANIKNSQREISNELKIINVMIKNLSTEDNIHLTPVDLNEIQRSLKTWTEQIQIVNDNIDRIYNKIHRCNFKLNVINQDISELKKLKSQNNNKKSKIFNKNGECSYCHSKLTIEQSLSRFELENNVFDIQNSIIEKTKDAEKISLELQSNKKLLDEKIEYYNSIENNSKIESQKINLDTYLNQQVNNGIRKQYNDKYTDVLVKNKKNEELLKEIDSKIRKINSELGKRKKEIKQYFGESIAKISVKLNSEIINDIQFDKFRGISGSGTENNRAVLGGYLAYFKTLDKFSVYKFPYGLDSIIKTEIDGLSLSQMYQTIEEEFLSLNGRLQI

SEQ ID NO: 92276 - protein, 330 aa, Lactobacillus crustorum; identical to SEQ ID NO: 92274

SEQ ID NO: 92277 - protein, 451 aa, Lactobacillus crustorum
MIFKEYVTIDGVEHSILRKGNLFNVDNNTETYSYSQYSKWLASQMNIDVKLQIQNTGKFTDPYPTEMLLFNYIDQDKSWDGFLYKNVSDSLKQYGGSNAVRGILEYELGISDNDVSESKEKKANIKNSQREISNELKIINVMIKNLSTEDNIHLTPVDLNEIQRSLKTWTEQIQIVNDNIDRIYNKIHRCNFKLNVINQDISELKKLKSQNNNKKSKIFNKNGECSYCHSKLTIEQSLSRFELENNVFDIQNSIIEKTKDAEKISLELQSNKKLLDEKIEYYNSIENNSKIESQKINLDTYLNQQVNNGIRKQYNDKYTDVLVKNKKNEELLKEIDSKIRKINSELGKRKKEIKQYFGESIAKISVKLNSEIINDIQFDKFRGISGSGTENNRAVLGGYLAYFKTLDKFSVYKFPYGLDSIIKTEIDGLSLSQMYQTIEEEFLSLNGRLQI

SEQ ID NO: 92278 - protein, 310 aa, Lactobacillus composti DSM 18527 = JCM 14202
MAIDNGGAIAQKGFSYQNAVISLVAIRNYKKSNFQIYVEARDDFEVTYDANYHAYIQVKGLSRVSLNKLLAQSKSQAGNLKQSIIEKNLSSGDDDSKYKIVVYNFTKSDLSDMQELETDELFERAYSFSDDQKRKIGNSCSRALSLVVTDFKTDSKAASKFLIGEMQHQNISVDNKADIVLSELWRIISQKSEKEIVTEADRELKKITANELVPILQKVSALEKFDTVLKKFDFNEFRNAKIKKEKAKILLQYSSIKSEVVSEMKQCDLENINETTLVTTLVNSDLLSGLDTDAQYAICISAYCDILEEV

SEQ ID NO: 92279 - protein, 551 aa, Lactobacillus composti DSM 18527 = JCM 14202
MRLFVKSILIVDPERKEANKYIFGEHSNLIMSEGNEIGKSSLIKSIYYTLGAPIKSFPKGWDYTNFIFQIQCDIDGRALTIQRFNQVFTVEVANRVQSFANEKNFSIWMQKQMHMNLRLQTANSEKFHHAYMNAVLAPFYIDQDKSWANFYQDAFENLAMYKGQPKPIIEYYLGLSNGRLLELNEQKKELHTAKVNLDGQIKQITGVRNSYSDDKNIDVVSPEQYIELQAELNQYLKITDELQRKVSKLVNRITKSKMDLDSYRHDYDELRKLLLATDNRFKKIEYECTYCHSVLTRQQSLTRLELSDNDFEIRQQKALLNQKIMDEESKLATLVQSAESLKKDFEDKNARISELRSAGNIDRYVSIKVLTELAQLADKYQVQLSHLEAEIKRIAKSQRDEKKTLETIHESLEADYEKIKNDISVDLGTTDLSDRQFLDFKKMKGGGTALNKSLLCLYLIYLSLLSKHSKTIFPMTIDSFLKNEISTENENRMFLSVQRFFMSLHNQTFFSVIKRNKGKLNISDSTVIFLEKPMLSGDLFDRLSLELISEE

SEQ ID NO: 92280 - protein, 310 aa, Lactobacillus composti DSM 18527 = JCM 14202; identical to SEQ ID NO: 92278

SEQ ID NO: 92281 - protein, 551 aa, Lactobacillus composti DSM 18527 = JCM 14202; identical to SEQ ID NO: 92279

SEQ ID NO: 92282 - protein, 315 aa, Bacillus cellulasensis
MIEIDNGGAIALKGFNYQKASIILVMIHNFEKDNFIVIPESQEDFEIHLGQDTYFIQVKGTKKLSIGKLKSRPSGKASIIEKNLSPGNVGDIRKIFLWDIAELTKNELISQEGTLIPMKHSLSLKQKTEIINTLDLDEEQKNRMNNQYIYITPFPNDINLALTFLKGEMVNENLLVSNDRAKLVLGELSLEIDRKSEIVVSTESDVERKKIDGNYLKQVFINIKQKEMFDEILDNLSINTIMKKKVKKEKLRIPLLYQNIKEQTKQKADINLLMRENDEGAINYLRDLLVEIVPDMKPTELSIALAIDCFCELGE

SEQ ID NO: 92283 - protein, 562 aa, Bacillus cellulasensis
MIIIAFSILDFKNKEAQNFDFKAGTNLIVSKGNTKGKSSLLKSMYYTLGFDVHQFPSNWNINFMYFQIEVLINNVKYNITRQKNIFRVSDVEVPLNVKEYSEWLQHKLEIKMQLANTHTKHLYEAYSSAVILPFYIDQDDSWDGGIYRNVTNTLNQYTRIPADIFKSVFNLSNYELLELQNSLTNYSKEKNTVVSTIKSLLNVLEDYRHENADVPTVSKIDKIALNKDIDRYLQMQNELNEQIVKYKMKLLNKQEMLDLQKQELSELEQLLKMNKKRYNSIETECQYCHSKLTKEQSLTRLDLSNNYFEISLLKEEIEKEVVKLTNEIIIFESQQNSIESKIDEIHRRIQNSKDLLTIDDYVKATAKKEASNELESLVDKQVLSKYNLEEKIKVLRREINKLKKEKESLREIIERDYTDLVFEIKKVLNDLNDTKLDLSELNLDELKFLEFKKISGSGMDKNKKFLAYYLIYFSLLRKYSSYIIPFCMDSFIKNEITGETAKKMFEAIEKYFFDTNQSFFSIVSENLKHLEFVDSYNKINVEGKLLVRDKYDEIALKFKFDS

SEQ ID NO: 92284 - protein, 315 aa, Bacillus sp. FJAT-21955; identical to SEQ ID NO: 92282

SEQ ID NO: 92285 - protein, 562 aa, Bacillus sp. FJAT-21955; identical to SEQ ID NO: 92283

SEQ ID NO: 92286 - protein, 321 aa, Bacillus sp. Leaf13
MDNGGAIAIKGFNFQKACIILVVLDNYLKEDFYITVEAEDDFVVKYKDYQAFIQVKGQNTSINKIKKIKEGTSIIQKNISSGDSTDTHKIFVLNFSNSDIKHMVRTEPGNICDKIYSFNNVQLKELISHLSYAKLPDLDERLKNTYIYIASFAKSLDDAILYLLGKLNHYDISIDNQRGRGIIAELALIIDQKSEKKIINPSDKEFKKIQSDYFKELLTKSQKLSEFQEILKGLDYSIIFKKKIELKRTKIAILFISIKKEIKSEIKKIKNYEELPEATIIDHILSIYSSKYEKSLLIAIIIESLIEIGDEIIDCSGIYNS

SEQ ID NO: 92287 - protein, 555 aa, Bacillus sp. Leaf13
MIVQEFTIVDYIQRRANTFTFESGVNLFLSKNNTIGKSSLMKSLFYNLGFNIKIFPQNWDVNSMIFKVKIVQKGEKYTITRNKDLFYINESSNALSEKDYALWLQDVLGSKILLKEKTSKKLSRVYASEVLLPFYIDQDKSWNGYLYKNTSDSFGRYSNIPKGVFEYYLSISNDRILELETDKNTLESEIKHLNLQLNALTLLNSEYNLTKNPKALAVDLDELKVEIQLYLSKLNLISNLIAKYNTEILSNQLNLNIEKNDVIELKKLAVYHNNRFKEIKNICIYCNSQLTLKQSLTRLEIRNNIFDIQRLIDEKNIKILNLESKISNLESLKQLESQAYNEVKTTYEEIRKYITFNEYIDQEANRKISNKYLYLESDIHTNLSKKNLCKKQKADEIRTLKKQIDSLKNTIAHRFKELINKISISITDLDIKDINVLDFKEIKSSGNDNNKKMLALYIIYSSIVDEFSKIKIPIGMDSFIKNETTTNSKQEMFKLVSEHFFKLNNQIFFSIVKENLKYLDNIENYHIISLDKPILKEIEPSNNIIQKEFGFISIK

SEQ ID NO: 92288 - protein, 321 aa, Streptococcus sp. A12
MVQDNGGAIAQKGFNYQNHVISLTAIRNYTKNNFEIFVESDDDFEVLYDDNYHAYIQVKGKKRIGLKSLLQKHEGKCSILEKHLTPGDGHSKYKIVVFHFTESELSKMQENTSEELFEHSLKLSTEQTDYILEQLDESFSTKLTNFSLVKTSFKNDYLEARTYLKGELINQGISVDGRDDLILDELDRLIKQKSEYIIENKDDKKLKRISAIELQPILQKISSKALFESELDKFPFSSYTKAKIKKEEVKIIQQYMYKKRQVIGLLESDIHRLETKELTEIAEEIKFCDILKSLESDTKYAIIISAYCDIVEGVANEPINH

SEQ ID NO: 92289 - protein, 555 aa, Streptococcus sp. A12
MNQLIINKISIVDYENKKANSFEFNEGPNLIISEQNGQGKSSLVKSIYYGLGCQLTSFPKGWKPQKYIIQLYVLINGESYIIKRHNKVISIKSSEASFIFKNFRDYSEWLQIKLGMSLKLTSKAQYEPKYVYVDALMSPFYVDQDKGWNGTLYKETFDGLGQYPASVFPKDLIDYYLGISNEELNNKKSQKEDFSIKSRSLSQKISQIEAVYNSYQEQNEIVESLPKDVKELKIEIDYYIKKTNEISLEIQKVTKGIEKTKLKLDIHRQDKNELELLLQDTSNRFEDIKYECSYCHSHLTREQSLTRLELEDNRLAINSLKESLVQRISQLEESLIDKQSKLYELSDKVAAYQRKIDEIKEIKDIENYISQSVLVELGKLARKESIAKEILDKEIDQLNNDIRDLQSELRHHINSLEGDYEDLKNNLSSLLESNGLSDRRFRDYKKLKGSGTNLNKDLLAIYLIYMNLIANNSEFKIPFAIDSFVKNEIDTISQERMFKAIGSYFLTLKTQTFFSVIRENLYKIDGDYCKIRVESPLLKEDRYEEISREIIEFGV

SEQ ID NO: 92290 - DNA, 1089 bp, Cyclobacterium marinum DSM 745
atgactgaaaacttaaataataatgtgaattcaggagttcaaactaatgttggaatggaattccaaaagcattgtacgctttacttgtttcttgataaatatgagcaattaaaaagtgaaagatattttatcattctggaacatcttgaagatattgtatttggctacttagatgaaaatgaaattctcacaaaaattgagacatatcaagcgaaaaaatctacaaacaaatgggtgttaagtggattatttgaaattataaagaaaattgcagaaacaagtcaagctattttaaatgacactcatcccaaaggaaatggctttactcaacaaaattattttgcaactaatcatacggttgaaataaaaacccaaattaataaaacaaaataccttgctaccattaatgaaactaatagcgaagtagattatttagatattgaccaagaattaaaaaataaaattactgaagggaatgatagtatttcattctcgccagaagatatcgaaagtcttgacaatttgacatttaaatatattgatattagtagaactcctaaagctcaactagagcaattacatggcaagtttatttccgtatttggagatagtattatcgaccataaagcagcacttgatacttttttataccatttaaaggaaattgaatccacatttaatcaggggaatatcgcaaaacttaaggatagttctaaacgaattgagtcaagcgaaatatctaatattttaaatatacttacaacaaagaaattagcctttgaattctggagacaaaaaggcgagttgatttgccaaaatcttgggattagtctatttgatattaatactttcaaactacatttccttaatagcttcgatgaatttaaggacttgaatgaaagtgaacacagaaaaatttatagttttattgttgataacaaacaggtttttagtaatcactatactgacaatgattgcattgtggctttttataatgagtttaatatgaaaaaatcaacaacgcttagagatattcaacttaaagcagctgtttccgccgcatatattgaaataaaaagcacgttatga

SEQ ID NO: 92291 - DNA, 1731 bp, Cyclobacterium marinum DSM 745
atgaaagtaaaattagatatagaaaagatattgatttatagtgaggtaaatgataaatacttctttactgagtttaaagataaattgaatgtaatttatgggaagaatacagcggggaaaagcactttaatccaattgatattgtattgctttggaataaatgataataaaattaagttatccgagattcttgctgaggaaatattcgtaagggttgattgtataattaaaaaagatgcaactcctgagaaatacactttcttaaggcaagatgaaactctattaattagagataataatggaaaaatattaaggtttaatggtattggaagtgataattcagcagagcatataaaacttaaaaaatattttaatgagttgttcgattttaacttattgttagagtcaaactcaggcattacagatgcccctattgaaacaatatttttaccgtattatgtatcacaagatgttggttgggtatatttacgaaagtctttcagtaatttaaatttctataaaaattttaaagaggatttcttagattattaccttggcatcgtaaatgttactgacagagaaaagaaaagagaaattgagaatactattagaggcttacaacaacaaattgccttttttacaaatgtagagcgtgaaaataaagattttgaggtttcaaaaattattgatagttctttgtctgggaaagcaaatgaattaattgaatcaattgcttcagtgaagagtgagcttttggaactagaaaatgcttacgttaaggagtcgaataaattgactttttataaccaaagactttcagttgtctcaaaagttaaacgtaaccatgttaatcagtttccaggtacagataattgccctacttgcacccaaattttaccgaaaaatattgaaggaatatattcatatttccaagctgacaatgatactattaatttacaacatgatttaaaagaaaaaataaaaaatgcccaatcaaaattaaactcactaaataagaaaattgaaaaagccagaagttctatagaatcaacgcatgttgcgtataaaaaatattcagaaagtgaaataacacttgaaaaatggatttataataaagctaatatccaactatatgataatttggttagccaagttgggaagttgcagattacattatcggaggagagagataatctgaaggattataaaactgacgatgaaatattattagagagacagaaaaagaataattcattcaagaaaacatatttacaaaacaatgtaaatttaggattacctacgcttgatgaagaacgcttttataaactttatgatatctctagtttcccgttccaaggagttcaattgcatttggctgttcttagttatcattttgcttttaataagctactcactgaatcgacggacattcatagattgccattcattttggacagtgttttcaaggaagatattgatggcgggaataaggataatatattaaaatttatcagctctaattttccaactgatactcaaacaatattatcaattgcagatgataaaaacattgactcaagaattgaatattattcgaaagagatttttaaaggtaatgcacatttaatatgtatagggaatggtattgaaaagaaagcattattaaaaaataacgataatgaacaagatgacttaatagaggaatcatttgaaataattgagaccgtataa

SEQ ID NO: 92292 - DNA, 1095 bp, Leptospira interrogans str. 2002000621
atgaataagaatattaaacatgatttagttaccaaaaaagtgagagaaaaggcaggggcaataagttcaaatagatttgattaccaaaaagattgggcgatatgcaagattatcgagttagatgagaaagggatggaatatgcaattattatggagcatcatgaggatgttgtcaccgtcaacccgttctccgatccgaaagaaatccatttttttcagattaaaacttcaaataaaaattggacattgcaatcgttaactaaaaaagaatcgaatctttctataattggaaaaatggcggattcgcacaaattatttccatacggagatagcttttcattttgctcaaacagtccatattcacttagcttaaaagactccgataacaaaagccaagattttgaatgtttatcgataaacttgatcaatgaagatgaaatcaaaaagattaaagagactttaagagatgacggtctatctgaaatagatatagataattttttacaaaagctaattttaatacgcttaaagatcgataaaagctctcattgcgccatcgcgaaagcaaagttaatcgatttcattgaaaaaaaatatggaagtatcccttatcgtcctggggctttatacaaaactcttttcgaagaagtaaaacgaaaaacgaattatgaagattcagtcggaacatatgacgaattggtagataataaaggtatcacgaagagccaattttcggcgatgattcaagtagcgcttgcgaattcaattccaaaaattatcgagattcgaaactttcttcaaaataaattgaattttgaaaatgctcctttgagattagttgcctcattattagcaaatctccaatccatatatattgacaggcaagaacaaaatattcaagtacagaagcttcttacagaagtggtgaatacagtaggaaatttaacaagcgaagaattggatttaggtttgtgggtaaacattaaaaaaatatcgggaattataggtcacactgatttgaaaagtaaagaatatatttatacatcaataggattaagtatttatgaaagactcgaaagttctccttctgattga

SEQ ID NO: 92293 - DNA, 1713 bp, Leptospira interrogans str. 2002000621
atgagaaacttaaaattcaacgaagtattgattctgtctctgaaagagaaaaaggcatttcgactaaagctagggaaaaagctgacagtagtacacggaaaaaatgaatcgggaaaatcaacactgctcaaatcaatttattgggcattcggagctgatccggctaaaattcacaggaattggagtgtaattgatccaattgtttgtgtaaattttgatgttgattcaaagaaatactcaattctaagatataaagataaattttctctattttcagaaaattctgaactaattgggaattattcttccgttggaaaagaacttaccccagagctttcaaaaatcattggatataagttagtcttaacagatagaaaaaataaagcagtcttacctcccccagctttcatttttttaccgttttactttgatcaagataaaagctgggtagaggcatggagtagtttttctaatcttgagcagtttaccaattggaaaagtcctgtaattgattaccattcaggtataaaaactgatgaatattatgtatttaaaagtaaaaaagattttttaaaagctcgaattaaagaaacacaagttcagataactcagtacgaacgaatcgaaaatacaattagaaaaagaaattcaaatattataattgaaatagacgaggaggagtataaaaagcaacttcaagaattaatggagaaccttgctaatttgcggagtaagcaagaagattacagattagaatatcgcaaactaaccgaacacgttcattctttaattcagcaggaggcgattttaaagagtaaaattcagaatataaataaaaactataaacattcattaacgctacctgaacttatttactgcccaacttgtggcgccgattataaaaacaactttgaggttagatttagactagctgattctgaagagcaatgtattgaatttctaacagatattcaaaatgaaaaaattgtttatgaagaaaaaatcatagcctttaagaacaaattaaattccgtagacctaaatctttctcaattgaataaagaaatcgaaaccggaaaagagaaaattagtttaaaacaatatctggaaattgaaggtaaaaaccaagcacagaaagctgtacataattttcaaaatagactcaagaaagtcttagggcatagaaacgttaaactaaataagatcgatgagaaattgcagtcatttaataatgatgatcgaaaaaatgaggtaattgcaactttcgaaaattcaatgcgaaaaaacttaaaatctttgaatgcatcaggagtgtctgaagaaacgttcaaaaatataactggaacaattcgtgaattaggaagtttaggtccacgtgcattgttggcttattattttgcttatcttgaaacaataaagcagaataaaaaaggcattttttgtcctattataattgattctcccaatcagcaagctcaagatccatttaatcataaagcaatcctcaagtttattcaaggtaatcaacccgaaggtagtcaaataattctaggggtggaagagttacattcactagatggacagaaaaatattattcaactagtaggaaaaaaaagccttttgaaatcggatcaatatcaacaagttaaaaagttgttggacccttacttagctagtatttttgaatctgactcgattgaaagtaagtcttaa

SEQ ID NO: 92294 - DNA, 696 bp, Leptospira interrogans serovar Bulgarica str. Mallika
atgaataagaatattaaacatgatttagttaccaaaaaagtgagagaaaaggcaggggcaataagttcaaatagatttgattaccaaaaagattgggcgatatgcaagattatcgagttagatgagaaagggatggaatatgcaattattatggagcatcatgaggatgttgtcaccgtcaacccgttctccgatccgaaagaaatccatttttttcagattaaaacttcaaataaaaattggacattgcaatcgttaactaaaaaagaatcgaatctttctataattggaaaaatggcggattcgcacaaattatttccatacggagatagcttttcattttgctcaaacagtccatattcacttagcttaaaagactccgataacaaaagccaagattttgaatgtttatcgataaacttgatcaatgaagatgaaatcaaaaagattaaagagactttaagagatgacggtctatctgaaatagatatagataattttttacaaaagctaattttaatacgcttaaagatcgataaaagctctcattgcgccatcgcgaaagcaaagttaatcgatttcattgaaaaaaaatatggaagtatcccttatcgtcctggggctttatacaaaactcttttcgaagaagtaaaacgaattatgaagattcagtcggaacatatgacgaattggtag

SEQ ID NO: 92295 - DNA, 1713 bp, Leptospira interrogans serovar Bulgarica str. Mallika
atgagaaacttaaaattcaacgaagtattgattctgtctctgaaagagaaaaaggcatttcgactaaagctagggaaaaagctgacagtagtacacggaaaaaatgaatcgggaaaatcaacactgctcaaatcaatttattgggcattcggagccgatccggctaaaattcacaggaattggagtgtaattgatccaattgtttgtgtaaattttgatgttgattcaaagaaatactcaattctaagatataaagataaattttctctattttcagaaaattctgaactaattgggaattattcttccgttggaaaagaacttaccccagagctttcaaaaatcattggatataagttagtcttaacagatagaaaaaataaagcagtcttacctcccccagctttcatttttttaccgttttactttgatcaagataaaagctgggtagaggcatggagtagtttttctaatcttgagcagtttaccaattggaaaagtcctgtaattgattaccattcaggtataaaaactgatgaatattatgtatttaaaagtaaaaaagattttttaaaagctcgaattaaagaaacacaagttcagataactcagtacgaacgaatcgaaaatacaattagaaaaagaaattcaaatattataattgaaatagacgaggaggagtataaaaagcaacttcaagaattaatggagaaccttgctaatttgcggagtaagcaagaagattacagattagaatatcgcaaactaaccgaacacgttcattctttaattcagcaggaggcgattttaaagagtaaaattcagaatataaataaaaactataaacattcattaacgctacctgaacttatttactgcccaacttgtggcgccgattataaaaacaactttgaggttagatttagactagctgattctgaagagcaatgtattgaatttctaacagatattcaaaatgaaaaaattgtttatgaagaaaaaatcatagcctttaagaacaaattaaattccgtagacctaaatctttctcaattgaataaagaaatcgaaaccggaaaagagaaaattagtttaaaacaatatctggaaattgaaggtaaaaaccaagcacagaaagctgtacataattttcaaaatagactcaagaaagtcttagggcatagaaacgttaaactaaataagatcgatgagaaattgcagtcatttaataatgatgatcgaaaaaatgaggtaattgcaactttcgaaaattcaatgcgaaaaaacttaaaatctttgaatgcatcaggagtgtctgaagaaacgttcaaaaatataactggaacaattcgtgaattaggaagtttaggtccacgtgcattgttggcttattattttgcttatcttgaaacaataaagcagaataaaaaaggcattttttgtcctattataattgattctcccaatcagcaagctcaagatccatttaatcataaagcaatcctcaagtttattcaaggtaatcaacccgaaggtagtcaaataattctaggggtggaagagttacattcactagatggacagaaaaatattattcaactagtaggaaaaaaaagccttttgaaatcggatcaatatcaacaagttaaaaagttgttggacccttacttagctagtatttttgaatctgactcgattgaaagtaagtcttaa

SEQ ID NO: 92296 - DNA, 945 bp, Leptospira interrogans str. 2002000626
atggagcatcatgaggatgttgtcaccgtcaacccgttctccgatccgaaagaaatccatttttttcagattaaaacttcaaataaaaattggacattgcaatcgttaactaaaaaagaatcgaatctttctataattggaaaaatggcggattcgcacaaattatttccatacggagatagcttttcattttgctcaaacagtccatattcacttagcttaaaagactccgataacaaaagccaagattttgaatgtttatcgataaacttgatcaatgaagatgaaatcaaaaagattaaagagactttaagagatgacggtctatctgaaatagatatagataattttttacaaaagctaattttaatacgcttaaagatcgataaaagctctcattgcgccatcgcgaaagcaaagttaatcgatttcattgaaaaaaaatatggaagtatcccttatcgtcctggggctttatacaaaactcttttcgaagaagtaaaacgaaaaacgaattatgaagattcagtcggaacatatgacgaattggtagataataaaggtatcacgaagagccaattttcggcgatgattcaagtagcgcttgcgaattcaattccaaaaattatcgagattcgaaactttcttcaaaataaattgaattttgaaaatgctcctttgagattagttgcctcattattagcaaatctccaatccatatatattgacaggcaagaacaaaatattcaagtacagaagcttcttacagaagtggtgaatacagtaggaaatttaacaagcgaagaattggatttaggtttgtgggtaaacattaaaaaaatatcgggaattataggtcacactgatttgaaaagtaaagaatatatttatacatcaataggattaagtatttatgaaagactcgaaagttctccttctgattga

SEQ ID NO: 92297 - DNA, 573 bp, Leptospira interrogans str. 2002000626
atgagaaacttaaaattcaacgaagtattgattctgtctctgaaagagaaaaaggcatttcgactaaagctagggaaaaagctgacagtagtacacggaaaaaatgaatcgggaaaatcaacactgctcaaatcaatttattgggcattcggagctgatccggctaaaattcacaggaattggagtgtaattgatccaattgtttgtgtaaattttgatgttgattcaaagaaatactcaattctaagatataaagataaattttctctattttcagaaaattctgaactaattgggaattattcttccgttggaaaagaacttaccccagagctttcaaaaatcattggatataagttagtcttaacagatagaaaaaataaagcagtcttacctcccccagctttcatttttttaccgttttactttgatcaagataaaagctgggtagaggcatggagtagtttttctaatcttgagcagtttaccaattggaaaagtcctgtaattgattaccattcaggtataaaaactgatgaatattatgtatttaaaagtaaaaagattttttaa

SEQ ID NO: 92298 - DNA, 1095 bp, Leptospira interrogans str. 2002000624; identical to SEQ ID NO: 92292

SEQ ID NO: 92299 - DNA, 1713 bp, Leptospira interrogans str. 2002000624; identical to SEQ ID NO: 92293

SEQ ID NO: 92300 - DNA, 1095 bp, Leptospira interrogans str. 2002000623; identical to SEQ ID NO: 92292

SEQ ID NO: 92301 - DNA, 1713 bp, Leptospira interrogans str. 2002000623; identical to SEQ ID NO: 92293

SEQ ID NO: 92302 - DNA, 1095 bp, Leptospira interrogans serovar Muenchen str. Brem 129
atgaataagaatattaaacatgatttagttaccaaaaaagtgagagaaaaggcaggggcaataagttcaaatagatttgattaccaaaaagattgggcgatatgcaagattatcgagttagatgagaaagggatggaatatgcaattattatggagcatcatgaggatgttgtcaccgtcaacccgttctccgatccgaaagaaatccatttttttcagattaaaacttcaaataaaaattggacattgcaatcgttaactaaaaaagaatcgaatctttctataattggaaaaatggcggattcgcacaaattatttccatacggagatagcttttcattttgctcaaacagtccatattcacttagcttaaaagactccgataacaaaagccaagattttgaatgtttatcgataaacttgatcaatgaagatgaaatcaaaaagattaaagagactttaagagatgacggtctatctgaaatagatatagataattttttacaaaagctaattttaatacgcttaaagatcgataaaagctctcattgcgccatcgcgaaagcaaagttaatcgatttcattgaaaaaaaatatggaagtatcccttatcgtcctggggctttatacaaaactcttttcgaagaagtaaaacgaaaaacgaattatgaagattcagtcggaacatatgacgaattggtagataataaaggtatcacgaagagccaattttcagcgatgattcaagtagcgcttgcgaattcaattccaaaaattatcgagattcgaaactttcttcaaaataaattgaattttgaaaatgctcctttgagattagttgcctcattattagcaaatctccaatccatatatattgacaggcaagaacaaaatattcaagtacagaagcttcttacagaagtggtgaatacagtaggaaatttaacaagcgaagaattggatttaggtttgtgggtaaacattaaaaaaatatcgggaattatagctcacactgatttgaaaagtaaagaatatatttatacatcaataggattaagtatttatgaaagactcgaaagttctccttctgattga

SEQ ID NO: 92303 - DNA, 1713 bp, Leptospira interrogans serovar Muenchen str. Brem 129; identical to SEQ ID NO: 92293

SEQ ID NO: 92304 - DNA, 945 bp, Leptospira interrogans str. UI 12758
atggagcatcatgaggatgttgtcaccgtcaacccgttctccgatccgaaagaaatccatttttttcagattaaaacttcaaataaaaattggacattgcaatcgttaactaaaaaagaatcgaatctttctataattggaaaaatggcggattcgcacaaattatttccatacggagacagcttttcattttgctcaaacagtccatattcacttagcttaaaagactccgataacaaaagccaagattttgaatgtttatcgataaacttgatcaatgaagatgaaatcaaaaagattaaagagactttaagagatgacggtctatctgaaatagatatagataattttttacaaaagctaattttaatacgcttaaagatcgataaaagctctcattgcgccatcgcgaaagcaaagttaatcgatttcattgaaaaaaaatatggaagtatcccttatcgtcctggggctttatacaaaactcttttcgaagaagtaaaacgaaaaacgaattatgaagattcagtcggaacatatgacgaattggtagataataaaggtatcacgaagagccaattttcggcgatgattcaagtagcgcttgcgaattcaattccaaaaattatcgagattcgaaactttcttcaaaataaattgaattttgaaaatgctcctttgagattagttgcctcattattagcaaatctccaatccatatatattgacaggcaagaacaaaatattcaagtacagaagcttcttacagaagtggtgaatacagtaggaaatttaacaagcgaagaattggatttaggtttgtgggtaaacattaaaaaaatatcgggaattataggtcacactgatttgaaaagtaaagaatatatttatacatcaataggattaagtatttatgaaagactcgaaagttctccttctgattga

SEQ ID NO: 92305 - DNA, 1524 bp, Leptospira interrogans str. UI 12758
ttgatccaattgttttgtgtaaattttgatgttgattcaaagaaatactcaattctaagatataaagataaattttctctattttcagaaaattctgaactaattgggaattattcttccgttggaaaagaacttaccccagagctttcaaaaatcattggatataagttagtcttaacagatagaaaaaataaagcagtcttacctcccccagctttcatttttttaccgttttactttgatcaagataaaagctgggtagaggcatggagtagtttttctaatcttgagcagtttaccaattggaaaagtcctgtaattgattaccattcaggtataaaaactgatgaatattatgtatttaaaagtaaaaaagattttttaaaagctcgaattaaagaaacacaagttcagataactcagtacgaacgaatcgaaaatacaattagaaaaagaaattcaaatattataattgaaatagacgaggaggagtataaaaagcaacttcaagaattaatggagaaccttgctaatttgcggagtaagcaagaagattacagattagaatatcgcaaactaaccgaacacgttcattctttaattcagcaggaggcgattttaaagagtaaaattcagaatataaataaaaactataaacattcattaacgctacctgaacttatttactgcccaacttgtggcgccgattataaaaacaactttgaggttagatttagactagctgattctgaagagcaatgtattgaatttctaacagacattcaaaatgaaaaaattgtttatgaagaaaaaatcatagcctttaagaacaaattaaattccgtagacctaaatctttctcaattgaataaagaaatcgaaaccggaaaagagaaaattagtttaaaacaatatctggaaattgaaggtaaaaaccaagcacagaaagctgtacataattttcaaaatagactcaagaaagtcttagggcatagaaacgttaaactaaataagatcgatgagaaattgcagtcatttaataatgatgatcgaaaaaatgaggtaattgcaactttcgaaaattcaatgcgaaaaaacttaaaatctttgaatgcatcaggagtgtctgaagaaacgttcaaaaatataactggaacaattcgtgaattaggaagtttaggtccacgtgcattgttggcttattattttgcttatcttgaaacaataaagcagaataaaaaaggcattttttgtcctattataattgattctcccaatcagcaagctcaagatccatttaatcataaagcaatcctcaagtttattcaaggtaatcaacccgaaggtagtcaaataattctaggggtggaagagttacattcactagatggacagaaaaatattattcaactagtaggaaaaaaaagccttttgaaatcggatcaatatcaacaagttaaaaagttgttggacccttacttagctagtatttttgaatctgactcgattgaaagtaagtcttaa

SEQ ID NO: 92306 - DNA, 1095 bp, Leptospira interrogans str. UI 13372; identical to SEQ ID NO: 92292

SEQ ID NO: 92307 - DNA, 1713 bp, Leptospira interrogans str. UI 13372; identical to SEQ ID NO: 92293

SEQ ID NO: 92308 - DNA, 1095 bp, Leptospira interrogans serovar Pomona str. UT364; identical to SEQ ID NO: 92292

SEQ ID NO: 92309 - DNA, 855 bp, Leptospira interrogans serovar Pomona str. UT364
atgagaaacttaaaattcaacgaagtattgattctgtctctgaaagagaaaaaggcatttcgactaaagctagggaaaaagctgacagtagtacacggaaaaaatgaatcgggaaaatcaacactgctcaaatcaatttattgggcattcggagctgatccggctaaaattcacaggaattggagtgtaattgatccaattgtttgtgtaaattttgatgttgattcaaagaaatactcaattctaagatataaagataaattttctctattttcagaaaattctgaactaattgggaattattcttccgttggaaaagaacttaccccagagctttcaaaaatcattggatataagttagtcttaacagatagaaaaaataaagcagtcttacctcccccagctttcatttttttaccgttttactttgatcaagataaaagctgggtagaggcatggagtagtttttctaatcttgagcagtttaccaattggaaaagtcctgtaattgattaccattcaggtataaaaactgatgaatattatgtatttaaaagtaaaaaagattttttaaaagctcgaattaaagaaacacaagttcagataactcagtacgaacgaatcgaaaatacaattagaaaaagaaattcaaatattataattgaaatagacgaggaggagtataaaaagcaacttcaagaattaatggagaaccttgctaatttgcggagtaagcaagaagattacagattagaatatcgcaaactaaccgaacacgttcattctttaattcagcaggaggcgattttaaagagtaaaattcagaatataaataaaactataaacattcattaa

SEQ ID NO: 92310 - DNA, 1095 bp, Leptospira interrogans serovar Australis str. 200703203; identical to SEQ ID NO: 92292

SEQ ID NO: 92311 - DNA, 429 bp, Leptospira interrogans serovar Australis str. 200703203
atgagaaacttaaaattcaacgaagtattgattctgtctctgaaagagaaaaaggcatttcgactaaagctagggaaaaagctgacagtagtacacggaaaaaatgaatcgggaaaatcaacactgctcaaatcaatttattgggcattcggagctgatccggctaaaattcacaggaattggagtgtaattgatccaattgtttgtgtaaattttgatgttgattcaaagaaatactcaattctaagatataaagataaattttctctattttcagaaaattctgaactaattgggaattattcttccgttggaaaagaacttaccccagagctttcaaaaatcattggatataagttagtcttaacagatagaaaaataaagcagtcttacctcccccagctttcattttttaccgttttactttga

SEQ ID NO: 92312 - DNA, 1095 bp, Leptospira interrogans serovar Lora str. TE 1992; identical to SEQ ID NO: 92302

SEQ ID NO: 92313 - DNA, 1713 bp, Leptospira interrogans serovar Lora str. TE 1992; identical to SEQ ID NO: 92293

SEQ ID NO: 92314 - DNA, 879 bp, Leptospira interrogans str. FPW1039
atggaatatgcaattattatggagcatcatgaggatgttgtcaccgtcaacccgttctccgatccgaaagaaatccatttttttcagattaaaacttcaaataaaaattggacattgcaatcgttaactaaaaaagaatcgaatctttctataattggaaaaatggcggattcgcacaaattatttccatacggagatagcttttcattttgctcaaacagtccatattcacttagcttaaaagactccgataacaaaagccaagattttgaatgtttatcgataaacttgatcaatgaagatgaaatcaaaaagattaaagagactttaagagatgacggtctatctgaaatagatatagataattttttacaaaagctaattttaatacgcttaaagatcgataaaagctctcattgcgccatcgcgaaagcaaagttaatcgatttcattgaaaaaaaatatggaagtatcccttatcgtcctggggctttatacaaaactcttttcgaagaagtaaaacgaaaaacgaattatgaagattcagtcggaacatatgacgaattggtagataataaaggtatcacgaagagccaattttcagcgatgattcaagtagcgcttgcgaattcaattccaaaaattatcgagattcgaaactttcttcaaaataaattgaattttgaaaatgctcctttgagattagttgcctcattattagcaaatctccaatccatatatattgacaggcaagaacaaaatattcaagtacagaagcttcttacagaagtggtgaatacagtaggaaatttaacaagcgaagaattggattttagggtttgtggggttaaaacattaaaaaaatatcgggaattatag

SEQ ID NO: 92315 - DNA, 450 bp, Leptospira interrogans str. FPW1039
atgagaaacttaaaattcaacgaagtattgattctgtctctgaaagagaaaaaggcatttcgactaaagctagggaaaaagctgacagtagtacacggaaaaaatgaatcgggaaaatcaacactgctcaaatcaatttattgggcattcggagctgatccggctaaaattcacaggaattggagtgtaattgatccaattgtttgtgtaaattttgatgttgattcaaagaaatactcaattctaagatataaagataaattttctctattttcagaaaattctgaactaattgggaattattcttccgttggaaaagaacttaccccagagctttcaaaaatcattggatataagttagtcttaacagatagaaaaataaagcagtcttacctcccccagctttcatttttttaccgttttactttgatcaagataaaagctgggtag

SEQ ID NO: 92316 - DNA, 1095 bp, Leptospira interrogans str. 2003000735; identical to SEQ ID NO: 92292

SEQ ID NO: 92317 - DNA, 1713 bp, Leptospira interrogans str. 2003000735; identical to SEQ ID NO: 92293

SEQ ID NO: 92318 - DNA, 1095 bp, Leptospira interrogans str. 2002000632; identical to SEQ ID NO: 92292

SEQ ID NO: 92319 - DNA, 1713 bp, Leptospira interrogans str. 2002000632; identical to SEQ ID NO: 92293

SEQ ID NO: 92320 - DNA, 1095 bp, Leptospira interrogans str. 2002000631; identical to SEQ ID NO: 92292

SEQ ID NO: 92321 - DNA, 1713 bp, Leptospira interrogans str. 2002000631; identical to SEQ ID NO: 92293

SEQ ID NO: 92322 - DNA, 1095 bp, Leptospira interrogans serovar Bratislava; identical to SEQ ID NO: 92302

SEQ ID NO: 92323 - DNA, 1713 bp, Leptospira interrogans serovar Bratislava; identical to SEQ ID NO: 92293

SEQ ID NO: 92324 - DNA, 1095 bp, Leptospira interrogans serovar Muenchen; identical to SEQ ID NO: 92302

SEQ ID NO: 92325 - DNA, 1713 bp, Leptospira interrogans serovar Muenchen; identical to SEQ ID NO: 92293

SEQ ID NO: 92326 - DNA, 1095 bp, Leptospira interrogans; identical to SEQ ID NO: 92302

SEQ ID NO: 92327 - DNA, 1713 bp, Leptospira interrogans; identical to SEQ ID NO: 92293

SEQ ID NO: 92328 - DNA, 1095 bp, Leptospira interrogans; identical to SEQ ID NO: 92302

SEQ ID NO: 92329 - DNA, 1713 bp, Leptospira interrogans; identical to SEQ ID NO: 92293

SEQ ID NO: 92330 - DNA, 1083 bp, Comamonas testosteroni CNB-2
atggcctttctcgacgtactgaacgactcactcaccaaggagcgaggtggaaggcatggcggaaaaggccatgagtttcaacgctactgggccctttgccatctcctgcaagtcgatctcgaaaaggacgactacctactgcttctggaatttatcgaggatgtggcagtcctgaatagcgaattctcgccaggtcaaatggagctttaccaattaaaaaagaaagagggaagctccacaaaatggacaaaaactaatctggcgaaaccgccgaaggaaggaaagtccatactagcgaagctacatgactcgaaatctatcgcaaaagatgagacggcagccattgctttcgtaagcaatgtgcccgtcgatctcacactcagcagtggcgacgatccaaccggactgtctgagttttctgccagtcaaattaaatcaacgctacttgccgatctcaaatcatcggtagctacggagttagggtgcgacctcgatgacattgattttgacaacttgaaattcatccgaagcccattggcaatggatgaccttgaaagccacgcaacaggtaaggtggcaacttttcttgcaaccaagtttcctgatcaatctcctcgtgcagatgtgttgtgcaaggccatttatagcgaactcaaagtcaaagccacttctacggaagatgccgccaccttcgtagacctgaaaagaattcgtggaatttcgaagcaacagttttctgcgatggttgcgctaacgttatcgcgcaaatccgacagcgatgtaattgatggttttttgtctggcctcgcgcaggagaatgttccttacattcaacgtgaatcgataaagtgtgcagcacgccagtttgtcgtggaaaaagcaggcaggggcagcagcctgctgtcactgctgcaaaagcaggttgagaaatcactcctgggaattcccaacaatttggtcacatcttgggaggttgccaattggattgttgaacaagtactcgctcagacgggaggcactgatttctcaatcctcgaccgtgattacatgattgccgcgacgctctactggatgaaccaatga

SEQ ID NO: 92331 - DNA, 651 bp, Comamonas testosteroni CNB-2
gtggacagccaaagttctgaagtaatccgaggtgcttttgccaaggacattgacaccttaaagcgccagttgtctgataaggaaaagatagctgctgatgccaaattcaaggttggtcagtttgatcttcctgaaaggacaaaagccatcaacgacttttactcagagcgcatggaactgttcgcaagtgagcttggggtgcatgatttgcgggaggacgtgaagaagcgtcctgacgctgccatctcagccagcggcagtgcgctgccaaggtcacttctcgcttaccagtttgctgtactccacacagcaaaggagaagggagatgcaaagcactttcccgtcgtcatagactccccaaatcagcaagggcaggatgctgatcacctgcgccagatgctcagcttcatcgtaaagcgaacgccgaatgatcaacagctgatattggccgtcgaagataagcccagcaactttagttttgatggtgggttggttgaattaactacgccttttagtctgctcgaccccggacagtacgatcttgcgtgcgatgaactacgagacatggttgtctctgtagaagcggggcttgaacaacgtctagcaagcagtcgggttggcgcgtttgaggacaacaacgagcttgtctag

SEQ ID NO: 92332 - DNA, 1185 bp, Comamonas testosteroni TK102
ttgctgttacagtgggtaccaaagcaacagtctgtaactaacgtgggctcagtgagaaattcggttcaagaaattgaggacatcgaatctaacgatgcgcttcatgacttcggcggttcgcatgccaacaaaggtcatgacttcgcagcctattgggtcatcggcaggctcatagagcttgaactggccaaacatcctgactatgtgttcgtttgtgagtacgttcaggatgtcgcagagttcgactcacaggtcaatcctcagaccgtcaagctataccagttgaaaaagaaggaagacggttactggaccgtaagcgacctcactggccagaccgcaaaaaataaaacttctgtcgctgatagtccggtacgaaagctaatccgccatgtccgagcattcaccactgtgagagccacaggcgcgctcgtatcgaactcaaaattcaaggtgaggctcaagggtgatgacagctcggtagaggttgtaacagtcgcgctcaatctgcttgatgacgagcatacggcgggacttaggacagctgtagcgcttgaggagacgagtgctgaacggacagtagttgcagacgatgtggacttgagcttggttgagctctgtcgtgcgaccctggcactggatgacctccagacgcatatgaccggtctcatgttcaacttcctcaaccaaatcgctactgaacacacaggtcaggcgtcatcgctagttgagactctctacgctcgcatcaaagagaggtcgcggcgcacggagaaggctccaaattggcctcaattgcttcagcgtcgaggatttagcaagaagagcttcaatgatgcggttgaagggttgaagcaaatcccagatgccgctctgttcaggagtcgtttgctctccaagctggccggctcgcgaaacgaacgatgggctgctcgtgtcaccgcaaagctctcgcagtgctcgatagagaaaattttgggcgggacagctaatcgttggcattcagaccaagcagccattgatgcattgtgcgaagaggcggacaacaaaaaccatagcgacgaagagttgtttgtaagcttatccaactacctgcagataagtctgccagtgctgagtgagtacgaaatttatgcattggcaatatatgaaatgtcccaatggaacctacgccaaaccctcgtctag

SEQ ID NO: 92333 - DNA, 1824 bp, Comamonas testosteroni TK102
atgtcaagcttgcaattcaagagaataagaatctgttcggaagcagagcaggcggcaatggagttgacgttcgacccgaaaaggaccctactttgggggccgaacggcgcaggaaaatcggcggtaattaagtcggttttccgagctattggggcggagccgcacggcgaacttcctggttgggattaccgggctattctcgcgttgaatttttcattccgagggcgtgaatttacctccgttagatttcaggacctgcgtggtttgtttgaagggtctgagcttcttggagcgactacctcggatgaagagtggaatgagatattttccgaagcggtcgactttcagctaagacttttgagtcgagatggccaattgcagcgggcatcacctgaacatttctttttgccatttttcgtgaaccaagatgggtcgtttggttcacactgggatacctttaacggaattaggaaatttcagcagtcggccttacaaacattagagtatttcgcccgagtccggccacctaaatatttcggaattaaagcagaagaacagggtgtcaaggtaaaaatcgcggagcgccgggcggaaattactacgcttcagcgtacgcggctaaggctcaagaagactcaacgagctttgcctgtcagattgaatcagcgagaatttcaagaagaaattcaggagttgaccaggcggctgttgaccttgtctaaggcgcaagaggatttacgaaagcacatcattgaagaccaagacctggaggtctcactgacggagcagatttcaatgtccgaacacgccctcaaggtgcatgaggctgacttccaatttgctgctcgcgagtctatcgataaaagcgaattcatatgcccaacgtgtaatgctaaacatcccgagagctttcatatgttcttggggcttgcagaagatgcacgtgaattgaatttgctgagggagcgcttggtacatatggccgcgagtgcaaaagagcggcttaaacggaatcgaagcaaagcaatagcgttgaagcgagatttcagtgagttaaacgctcttcttgctacgaaaaaggggaaattcacctttgatgattttttgaagagccgaagtgttttagtggctgatgaccaattggcctccgaggagcgcttggttcgcaaggagattgaagctcacgagcggcagttgggtgaaataaagataagtctggcggatttggagaaacatcacgacgcaaaggctccgcttaagctgtttcgtacaaagtttgctaaagcattggtcagactcgaagctcctaatcccacgggggttagcaaatggccgcttgccaagcggccggatgcttctgggagtcgccatgccaggtcaatttttgcttactattctgccctctggcacacgatggttacagatggccgcctgcctgccccaatctttgttgactcaccaaatcagggtggccaggacaaggagaatttgcagaagttgattgcctctgtggtcagagctgcgcctgcgggttcgcaagtggttttgtgccatgagatgtatgtggaagctttcagcgacggcaagacaattgaatttaagaaaggctcgaagctccttgatggcgcaacgttcaaaaggttgagtcgcgaaatgtttcaatacttggcagttgctcgaacatatctcgctcaggtcaaggacgtggacggcggttcggaggccgagtctcagccgggtccggacgttgcccgacagcgcgtgagcatttctggtcaacgccccaactctgaagcaaagcagcgcgacctcttcgaaccgtga

SEQ ID NO: 92334 - DNA, 1170 bp, Pseudomonas aeruginosa MSH-10
atgcttgagaataaaagcccaagggaacagagtggcagggactctttcagcagatatcgcgcacaagttcgttcggcagcggtagcaactctctcaattcttgaaggacttgatatcgatagagtttactgtgacttgcatgatgattttgtcatcagaaagaaagatgaaagtggttttacttatatattttaccaagtaaagaccaagggcaagcaaaaccacaactggactatcaacgagctatttggcataaagaccaaactcaaagaccagtctaagcaatgttcaaagtctataaaaagcagtttcattggaaagcttctactgcacacggttgtctttgaccaatactgtaattccgtcgtatttcagagtaatattcataatagcgatgaagttattgagttactggaagatatagagtcaggtgcttttgctaacaagtttacaaaggttcttcttgaacgcttcaatgagtgttttaacgaaaatccaagtgagtataccttggagcaagtcaaagaacgactgtccaaactaaaacttcagtcagacgtctcctatctaaaagaaaacgataattccttcgacctggttgtaaaagaaaaaatttatcaattcagcgagatcgaacttgagcgcgccgaatttagagaaatcctactcagactacttgacctggttgagcgcaagtccagtgggacaataaagacttggagtgcagagagtatcgagaagtttgcagggatttctattgatgacctgctatcagtattgagcatatctagagatgcttacttggccttgcttgcgggaggagaccctaacgccattaagtctgcctctatgatacaaagatctttgcgtaacaacggcgcagacatatctgtcgtgatgtactgctcaaggtgcaaaatagattgggatttatggtttagaaaggcgcgacacgttatagctgaatttgatcttttatttatctctgaccgcattgcttctatactccggagtgcggtgactcctcagggagttctaatagttagaaatttaagacagcctatcaaaaagttgttgggcgaactcgagaaaaagaagctaaagttcgacctaaatgaggatctaattttaggcggaatattctctacacttgtcagaggcaagtcatga

SEQ ID NO: 92335 - DNA, 1770 bp, Pseudomonas aeruginosa MSH-10
atgaacctcataagtttaaagatttatccaaatggcccttcaggctgggggtcgccactactcaaatttggccgtgacataacgcagctatatggtcctaatggttgcggcaagactcccgtcgtgcaatctattccatattgcttaggatttcctagtatatttaggaacgacatctacgataagtgtaaacatgttgagcttactgtttcatctagaaaaggaattctaatacttcgtcgcgtatacagcagggattttgacatacaggttacagagccctctggggttatacagcgtttttttaacgagcttgattattctcgttatatttttgagtggctagatctaacggcacacaacttggtcactactggaaatcagttaggttccccctacctttcctcttttttgcctctctactacctagatcaagacattgggtacgcggaaatttattgcccgccgagtcgattcatcaaagaccaattctcagaaatgatgagaatggtctttgacctccctgtcaaaaactcatttgatataaaaaaggataaatttagagccaaggaacgcttagactacctagataaagaaacacaaacattagccagaatggttgagtcggctcaaaaaagcacttcgggaatacataaatcaagacccgagctagaggctgaaattgaacagttcgaaattcaagttcagaaccttcaaagctttggtgcaagccgtgatgaatccatcgatgcgattgatcgccttatatctggtcgtagaagtgtaattctcgaaatatcagacgaaatccgccaactccaaatacgcaatgaaggaattggtaggatggtccatgaaattaatactgagattgagacccttaaccttaacgaagaggctcgtagggttttcttatctttccaagagatttgtggctccgaaatttgtcaactattttccgcgagctcagagtcttataccaagaatttgctttatcttcgtgaccaaatcaaggatcttgagcgcaacgccagccttgatgaactgagaattgatgaactacagcagcaacgcaccgctcaagagatcgttgtccagcaacttgtggatgaacgcaaaatttcaagtgctagtagtgaaatctctgctctagttagctctataactaaactcaagacagaaatttttgagttacagatgcagcttgacgaacttaaaaaagtcgaggccctcaaggaaaagcatttcaactctctaattgagagagacaaggcttatacgctacatcaatcattctctagcgatagatcttcatcgccagaactaatcaaaatcagagcagacatccgccaacgttttatagagtggctcgatacgctacacacatacaacgttagcagagatataacctttaaagatgattttactccattacttggcattgaaagcattgctcagatcaagggcagcactaaaatacgtactgtattggcctatcatgcagccgtctttcaggttttcgctgagcgtaaagtctctggatttagatttctaatactagatacgccaaagcagcatgacattaacaatgatgatcttggtagatatctagatgctcttaaagagctttgcggcaagcacggcatacaagtggtattttccacaactgaataccattactcgggggatgaaaatgactctgaatggctgcctacttatcctggtgctgatcagagcatgttcttgcacttaggtggcgttcaggactga

SEQ ID NO: 92336 - DNA, 1146 bp, Pseudomonas aeruginosa CF614
atgatagaaagtcaagggatgctgggggaagaattggatacagaaaatggatcgccaggtagaaaccctcttgccgcagcacagagggaaagagctggtgcgcaaacattcgaaaagtacgagtaccagtaccactgggctctctgccgaattcttggtgctcatgaaaactcggatgattacgttgtctttatcgagcttcatgaggacgtagtattggcgacttcgaccgatgaatctctcgcgcggtttgaattcaatcagatcaaaaacgtcaatgctacaccttggaatcagaagaaattgacttcgatcccaaagtccactaccaaaaaaaattcaaattcaattcttggaaaaatgctccaagggattcaaaaaaagccctttttcgaaaagctgaactcgctcgatttggtcgcgacctgtggctttaagctacctcctaaaaccgatggcttgaagctctcaattatttcaatcggcgatcttcatgatgagtgtctgaaagacatccaggctgcaatcgacaaagagcttggctcctaccctattcccagaaccttaaggttcatcacacctgatctagccaccaccggatttcaggatgtagttattggccgaatttccaaacttgtcaacattaaagctcccggagccatgtatgactcatcaacgatttatcgagtattaattgatgacttgcatcgcaagggaactgtagcctttgattttactgactggaaaaatcttataaagaacaaaggaaccactcatggcgatgttgagcgggttatatcgtcctatacggagaagaaggggctcgaggcattcgagaaagacttggacgatattctcaaggatcttgaactgaaatcgaataagcggattcaggtacgcagagcgtttgaacgctatcacaacgccgtgcgcttggagcgttcattgattgccattgacaaccaacaagcagttaaggatgcggttgaacacaactttgaagtattcgaaaaacaaggcgtgatggattttatgaatctgacacttgaaattttgccagaggcaaccaaaaagaatctggtgaacttggagtcaatccaagcagccatcatttacgaactattgagcaagtgtcatgaaaaatga

SEQ ID NO: 92337 - DNA, 1764 bp, Pseudomonas aeruginosa CF614
atggaaaacttagtattcaaacgactagtagtggcgtccgataccctaaaatccggaaatcagttcgagttcaaacctcgcttcaacttgataacggcgaacgacaatagcgttgggaaatcgactctagcgaagttgcttttttgggctctaggtggagaccctgtcttagatgttacgtggacggggtttgacgttcgatgcctggttgacttcagtgtcggcaatcagacttatcaggcggggagatacgggaacatcatgttccttcgtcgcccaaatggagaatgggaaaaatttcccaaaatcacaggcgcatactcggatgcctttgctgagatcgtaggcttcgaggctctattgccgagccggagcgactcaaccaaactcgaaacaccgcctcctgctttctactttctgcctttctacgtagatcagcagcgcagttggtcccacgcatggaacggctttaccaatcttgagcaatacgcgaaatggcagaagaccatcatcgaataccacacaggctatttacggcctgaatttttcacgttcgaagagaagattgctgctcagaaccttgagaaaaaaactgcagaaggtgaagttagaaagattgagacagctattgatgtagtcaaaacatacgtacctcaatccagaaaaatggtcaccctatcaaaaggtgagttcgacatcctcgcctccgaggtctctgacgacatcgcaaaattgcaggctaagcaagaggatctgcttgggacgattgccgaacttcaaacggaacgtgtctatttacaaggccaacttgatctggcagcgattgcatcttctgaacttgataaggattacaccttctctgtcgagtgtattgaaggtgagtctcttctttgcccgttgtgtggaaccatgcacgacaattcgtcaccgagtcgagcctccattctcgccgacaaagacgaggctgaaaggcaagtaatgcaaatcaacgggaagatcgagcggctgaataaagagttggctaactctcagaaaaggcttgagagtacgcgcaccgaaattgatgagataaacagcaaatacaaatcgcttgagccctcgagcatgcctgaaaatcaggaaaatgcttccgaagcatcatttctagacagcatagcatctcgtgcagttcaaaaacatgtacagcggacgatggagacaaaaacagctttaatacgttccataaattctacgaatagaagcttgagggccgaacagaaaaaactactgaccaaggaacagcgggaggatctgaacgctgcattcaaaaactctttgacctcttacctacaggagctgaatgcgcaaggcgttaatctggcacctgtcgaatcccccctagattacaagaaaatccatggaagcggaggcgcagcggaaagcacccgtggcatcttggcttactacatgtccgttatccggcaggcacacaaagcagaaaatgaggctttttcggctattgtgatcgacactccgaatcagcaggaacaagctgacttcaactacgaaaaaattctccaattcttgacgggtgcagtaccttcaaacgcacagctgattttatgcgccatgaatcgcgacgaaatcaaggactacaaacgtgaggcgcatgtgatcgaactggacgaacagaaaatcctcaaagagacgaattacacggagtgccgatctttgcttaactttgatggatcaatcacagggccttcgaataatttgccgagttaa

SEQ ID NO: 92338 - DNA, 1047 bp, Pseudomonas aeruginosa BL20
atggatagggtgtactgtgacgtacatgaagactacgtcgtaaagcacatagttaactccaaggctcagtatcgctttgtccaagtaaagaccaaaagcaagctaaactaccaatactccattctggaaatatttgggctcaaaaaaaagcccaggaaggacaaccctgaacatgatttggcgggcagcttcgcagggaagctcttgcttcatgtcgaagaatttggcgaagcctgcagatcaattgagatttgcaccaatgttaacttcgacgacgaagtcgaacaaatcgttagcgaaatacaaggcaagctaagccctaccaagcatacaactagcttgatttccgaaacaaaaaaactcatcccatctctcaccaccaaaagtgatatggaggttatagacttcctttcgcatttagcactagcaccgagaaagcaaatcctcaacgaggaagaggatatcttcgtaacacaagcgtcaacgcaaatttataaatatagtgaaatcaatcttaaccccattgaggttaagaaaataataattcagctcttatctctcatagaagagcgctctgccacccctctttccagcaatatcacagaaagtgatttagacgccaaggctagcgtaaatctaaatgacatcctggatattctttgcatatcacgatccgcttattatgcgcttaaagctaacggtgacgatagtgcaataaaatccgtatcaatcctgcagcgaatgctgaaaagatccggcttctcagacgaaactgtagataccttcgccggattcaaatgcaactgggaaacatggtatcggataaatagacatgcactcctagagttccgcctcgccatcgccaaagaaaagatcatccaactggccaagaaaatggcaattggtcagatcgacatgaactccataacccccgaaatttcactattaaaatccgatctctgcaccactcttggccgacaagatatcgatgaagagcttacattcggtgccgttctctctgaactggtgaaaggagaggcacaatga

SEQ ID NO: 92339 - DNA, 1791 bp, Pseudomonas aeruginosa BL20
atgaagtttgaatcgctggaaatcatcccaaacagtccaaacggctggcactctggcgagcttaaatttggcgaagcaattactcagttatatgcgaaaaatggcagtgggaaaacccctctgatccaggcaatgatgttttgcttgggtctacacgtgcagttcagggatgacatagttagaaactgcaagatggcacgactgaaagtcatgcttaatggaaagggcttcacccttgaacgaatgatgggggactccttcgatttgacggtaaaagtcgacaacaagaccgaaaacagattctacaacgaggaagatttttcgaagttcatgttgaaatcgctaaagctaagaagcgataggctggtaactaacggaaacactcctacgatcccatatttctctgccctgcttccactattctacttggatcaagatcagggatactctgagtactatgcgccgccacgcccaggctttataaaaaaccaattttctgaaatggtcaggcttgccgcaaactttcctccacagcactcttacgacaagaagaaaaaagcgattgaggttaaaaaagaccttgattacttagacatcacaattgtggacagccgcaaactgatggatcgcctggctcaggaactcccgtccccggtcagaaagattgaggatattgaaaagcagatatcagaatctaaatctcgactggaagacttgaaaaagacaaaagatatcaagagcgagtctatttccagtcttgatcatttgataggcgctcagagacggcggcatcacgagctaacatctgaagaggcctctctcgagtccaagatatccagctccacacaaatacgtgaagaaattcaaagcgaaatcgagactctcaacctaaatgaagaggcaagaagggcatttgtctcgttctccgacatatgcacatcgccgtcttgcggaatattcatggctagtgcggactcttatggaaaaagcctattatatctacgagatcaaattaaagatctcgagattgccaccgtatcgaatattcaaaaagctgaagccatttccactgagaagcaatttattgaaaagcaaattactcagctagcacagcaaaggggtcttgctgagcgcgaggcaggcatcgaagtattcatcgaagccatcagtagaattgcttctgaaattttcgaattagaattggaaaaaaacaaactcgagaaatacgaacaacagaaaaaatctcacttggaactcttgactaggcgagagaccactttaactcttgaaaattcactacaaacctcacgagagcaatccccagatattcttgaatttagaattgaactcggccaaaaaatggcggagtggctggacattcttaactctaagaatatttctagagatattcgaatcgactcagaactgaaaccgatcctaggtaccgagaagcttggaataattaaaggaagctcaaaagccagaactgttcttgcgttccacgctgcactttttgagctctgcacaaacaaccaaaactctccattcagagtattgattttcgatacgcctcgccaacaggaaattcactgggaagatcttgacgcgtacatccaggcgctgaagtccgtagcagtaagaaataaggctcaagttattttctctactactagctataaatatgaaattgacacaaagaccgacatagaatggctgcctaaatttgcgggcgatgaacagccaatgtatttagggaagatcggtcaagctccgattgaagggagtgagtaa

SEQ ID NO: 92340 - DNA, 1047 bp, Pseudomonas aeruginosa BL09; identical to SEQ ID NO: 92338

SEQ ID NO: 92341 - DNA, 1791 bp, Pseudomonas aeruginosa BL09; identical to SEQ ID NO: 92339

SEQ ID NO: 92342 - DNA, 1146 bp, Pseudomonas aeruginosa BL08
atgatagaaagtcaagggatgctgggggaagaattggatacagaaaatggatcgccaggtagaaaccctcttgccgcagcacagagggaaagagctggtgcgcaaacattcgaaaagtacgagtaccagtaccactgggctctctgccgaattcttggtgctcatgaaaactcggatgattacgttgtctttatcgagcttcatgaggacgtagtattggcgacttcgaccgatgaatctctcgcgcggtttgaattcaatcagatcaaaaacgtcaatgctacaccttggaatcagaagaaattgacttcgatcccaaagtccactaccaaaaaaaattcaaattcaattcttggaaaaatgctccaagggattcaaaaaaagccctttttcgaaaagctgaactcgctcgatttggtcgcgacctgtggctttaagctacctcctaaaaccgatggcttgaagctctcaattatttcaatcggcgatcttcatgatgagtgtctgaaagacatccaggctgcaatcgacaaagagcttggctcctaccctattcccagaaccttaaggttcatcacacctgatctagccaccaccggatttcaggatgtagctattggccgaatttccaaacttgtcaacattaaagctcccggagccatgtatgactcatcaacgatttatcgagtattaattgatgacttgcatcgcaagggaactgtagcctttgattttactgactggaaaaatcttataaagaacaaaggaaccactcatggcgatgttgagcgggttatatcgtcttatacggagaagaaggggctcgaggcattcgagaaagacttggacgatattctcaaggatcttgaactgaaatcgaataagcggattcaggtacgcagagcgtttgaacgctatcacaacgccgtgcgcctggagcgttcattgattgccattgacaaccaacaagcagttaaggatgcggttgaacacaactttgaagtattcgaaaaacaaggcgtgatggattttatgaatctgacacttgaaattttgccagaggcaaccaaaaagaatctggtgaacctggagtcaatccaagcagccatcatttacgaactattgagcaagtgtcatgaaaaatga

SEQ ID NO: 92343 - DNA, 1764 bp, Pseudomonas aeruginosa BL08; identical to SEQ ID NO: 92337

SEQ ID NO: 92344 - DNA, 1170 bp, Pseudomonas aeruginosa X24509
atgcttgagaataaaagcccaagggaacagagtggcagggactctttcagcagatatcgcgcacaagttcgttcggcagcggtagcaactctctcaattcttgaaggacttgatatcgatagagtttactgtgacttgcatgatgattttgtcatcagaaagaaagatgaaagtggttttacttatatattttaccaagtaaagaccaagggcaagcaaaaccacaactggactatcaacgagctatttggcataaagaccaaactcaaagaccagtctaagcaatgttcaaagtctataaaaagcagtttcattggaaagcttctactgcacacggttgtctttgaccaatactgtaattccgtcgtatttcagagtaatattcataatagcgatgaagttattgagttactggaagatatagagtcaggtgcttttgctaacaagtttacaaaggttcttcttgaacgcttcaatgagtgttttaacgaaaatccaagtgagtataccttggagcaagtcaaagaacgactgtccaaactaaaacttcagtcagacgtctcctatctaaaagaaaacgataattccttcgacctggttgtaaaagaaaaaatttatcaattcagcgagatcgaacttgagcgcgccgaatttagagaaatcctactcagactacttgacctggttgagcgcaagtccagtgggacaataaagacttggagtgcagagagtatcgagaagtttgcagggatttctattgatgacctgctatcagtattgagcatatctagagatgcttacttggccttgcttgcgggaggagaccctaacgccattaagtctgcctctatgatacaaagatctttgcgtaacaacggcgcagacatatctgtcgtgatgtactgctcaaggtgcaaaatagattgggatttatggtttagaaaggcgcgacacgttatagctgaatttgatcttttatttatctctgaccgcattgcttctatactccggagtgcggtgactcctcagggagttctaatagttagcaatttaagacagcctatcaaaaagttgttgggcgaactcgagaaaaagaagctaaagttcgacctaaatgaggatctaattttaggcggaatattctctacacttgtcagaggaaagtcatga

SEQ ID NO: 92345 - DNA, 1770 bp, Pseudomonas aeruginosa X24509
atgaacctcataagtttaaagatttatccaaatggcccttcaggctgggggtcgccactactcaaatttggccgtgacataacgcagctatatggtcctaatggttgcggcaagactcccgtcgtgcaatctattccatattgcttaggatttcctagtatatttaggaacgacatctacgataagtgtaaacatgttgagcttactgtttcatctagaaaaggaattctaatacttcgtcgcgtatacagcagggattttgacatacaggttacagagccctctggggttatacagcgtttttttaacgagcttgattattctcgttatatttttgagtggctagatctaacggcacacaacttggtcactactggaaatcagttaggttccccctacctttcctcttttttgcctctctactacctagatcaagacattgggtacgcggaaatttattgcccgccgagtcgattcatcaaagaccaattctcagaaatgatgagaatggtctttgacctccctgtcaaaaactcatttgatataaaaaaggataaatttagagccaaggaacgcttagactacctagataaagaaacacaaacattagccagaatggttgagtcggctcaaaaaagcacttcgggaatacataaatcaagacccgagctagaggctgaaattgaacagttcgaaattcaagttcagaaccttcaaagctttggtgcaagccgtgatgaatccatcgatgcgattgatcgccttatatctggtcgtagaagtgtaattctcgaaatatcagacgaaatccgccaactccaaatacgcaatgaaggaattggtaggatggtccatgaaattaatactgagattgagacccttaaccttaacgaagaggctcgtagggttttcttatctttccaagagatttgtggctccgaaatttgtcaactattttccgcgagctcagagtcttataccaagaatttgctttatcttcgtgaccaaatcaaggatcttgagcgcaacgccagccttgatgaactgagaattgatgaactacagcagcaacgcaccgctcaagagatcgttgtccagcagcttgtggatgaacgcaaaatttcaagtgctagtagtgaaatctctgctctagttagctctataactaaactcaagacagaaatttttgagttacagatgcagcttgacgaacttaaaaaagtcgaggccctcaaggaaaagcatttcaactctctaattgagagagacaaggcttatacgctacatcaatcattctctagcgatagatcttcatcgccagaactaatcaaaatcagagcagacatccgccaacgttttatagagtggctcgatacgctacacacatacaacgttagcagagatataacctttaaagatgattttactccattacttggcattgaaagcattgctcagatcaagggcagcactaaaatacgtactgtattggcctatcatgcagccgtctttcaggttttcgctgagcgtaaagtctctggatttagatttctaatactagatacgccaaagcagcatgacattaacaatgatgatcttggtagatatctagatgctcttaaagagctttgcggcaagcacggcatacaagtggtattttccacaactgaataccattactcgggggatgaaaatgactctgaatggctgcctacttatcctggtgctgatcagagcatgttcttgcacttaggtggcgttcaggactga

SEQ ID NO: 92346 - DNA, 1170 bp, Pseudomonas aeruginosa MSH10; identical to SEQ ID NO: 92334

SEQ ID NO: 92347 - DNA, 1770 bp, Pseudomonas aeruginosa MSH10; identical to SEQ ID NO: 92335

SEQ ID NO: 92348 - DNA, 1170 bp, Pseudomonas aeruginosa MSH3; identical to SEQ ID NO: 92334

SEQ ID NO: 92349 - DNA, 1770 bp, Pseudomonas aeruginosa MSH3; identical to SEQ ID NO: 92335

SEQ ID NO: 92350 - DNA, 1047 bp, Pseudomonas aeruginosa 148; identical to SEQ ID NO: 92338

SEQ ID NO: 92351 - DNA, 1791 bp, Pseudomonas aeruginosa 148; identical to SEQ ID NO: 92339

SEQ ID NO: 92352 - DNA, 846 bp, Pseudomonas aeruginosa WS136
atgttgttacacgtggataatttcggtgacacctgccactctctcgtcatcttaacgaacatcaacttcgacgatgatgtcgaaggattggtcagcgacgcacaatccggagaaattgtatcaaaacatacgacaacgctaatagctgaaacaaaaaagcttgtaccaagcctggcagcaaagactgacaaagaagttctcgacttcctgtcccacctaaagcttgcgcctcgtcagcaaatcttgaacgatgaagacgataacttcgtttcaagcgcacatggtcagatttacaaatatagcgaaataaatttaacccctaaggaagttcggcttctgattattcagcttctatcactaatagaaagcaaatcatcagaaaaaataaagggcagcatgaccgaggatatacttaatgataaagcgagcatagccctcgatgacatgctcgacatccttgccatttctcgcccggcctattatctcctcaaaaatggcggcgacccgaacgctattaaaagtgtttcgattcttcagcgcgtattaaagcgaaataactataaagaagaaacgcttaactcatttgcgaacttcaagtcgcagtgggaaacctggtatcgagttaacaggcacacaatccaagagctcaaacttcttgagttgatggatgaaataaaaattctgacagacaacctagctgtcggaaaaatagacatgaaaacaattacaggcgcggtcgtcaagctcgcaactgatcttcgcatgctattaggccgcaatgacctaactgaagaattagtttttggagccgtactgtctgaaatcgtgaaaggagagtcttcatga

SEQ ID NO: 92353 - DNA, 1782 bp, Pseudomonas aeruginosa WS136
atgaaatttgaatccctacagttctttgcaagccataatggtggatgggcttctcaagagctgaagtttggtaaatctattactcagttgtttgcccttaacggaagcggaaaaacaccgctaatccaatccataatgttttgtctcggattagacgtccaattccgtgaagatatcattcggaatactggaaaggtcgtcctacgagcaaatataaacactaacttactttcctttgagcggaagataggagagaaatacgacataaccgttagcagcgacggcagaactatcaatcgcttctataacgatgaagacttttctaggttcatgctaggcatcttgaacctaagatctgagcgtctgactaccaacagtgacaccgctacaattccgtttttctcggcgatactgccactattctatctagaccaggacaccggttattcggactattacgttccgccgcgacatggttttatcaaagctcagtattccgaaatgattcgcctagccgtgggcctccctgccagaagctcattcgacgcggccaaaaagacgatcaatctcaaaaaagagctcgactacctggataagacaatcacagatagccgtaagcttatggagaggctacgacaagacctcccagccgctccacgatttgaagcagatactgagcgtgacattacctcactcaaagctcgtcttgatgagttgaagacgaccaaggatattaaaagcgagacattaaatagcttcgacttcttgattaccgatcttcgtcgccagcaccgagagatagcctcacagcatataaccctagagtctaggattcgcagttcctctcaaatacgaaatgagatcgaaagcgaaatcgagacccttgatttgaatgaagaagctcgccgtgcattcatttcttttagcgagatatgcacaaccccctcgtgtggtatgtttctcgtcagctctgactcgtatggcaaaagcctgctttatctcaaagatcaactgaaagacctagaagccgtgaccatcgcgaacatacagcaggctgaagctctgctgaccaagatgacttggatagaaggacaaatcgctgatctttccgcaaagcgagggattgcagagcgcgaagcagggattgagatgttcattgaggcgatcagcaaaattgcctccgaaatcttcgagttagagctcgaaaaaggtcaacaacagaaacacaagagccaggaaggtaagcacctcgaactgctgaatcggcgagaggcggttcaaaacgagctagagtctctcggaaaaaccagagagcaatctccggatgtaatgcgattcaagctcgcgttagccgagaaaatggcccgttggctcgacatcctaaactctaagaacatctccagagagatccagatcgacagtgatctgaagccaattcttggctctgagaagcttgggattatcaaaggaagctctaaggcccgtacggtgctggcattccacgctgcgctatttgaaatctgcaccggcaatccaacctcgccgttcagaacactgatattcgatacccctcggcagcaggagattcactcagaggatctggatgcgtacatcaaagagctcaaggtagtggctctaaaaaataatgcccaggttatcttctcgactaccagctaccgcttcgagatcgacccggcgacggatgaagaatggcttccaaagttcggtggttttgaacagccaatgtacctcggacacttcaataacattctggactcatag

SEQ ID NO: 92354 - DNA, 1128 bp, Pseudomonas aeruginosa
atgctgggggaagaattggatacagaaaatggatcgccaggtagaaaccctcttgccgcagcacagagggaaagagctggtgcgcaaacattcgaaaagtacgagtaccagtaccactgggctctctgccgaattcttggtgctcatgaaaactcggatgattacgttgtctttatcgagcttcatgaggacgtagtattggcgacttcgaccgatgaatctctcgcgcggtttgaattcaatcagatcaaaaacgtcaatgctacaccttggaatcagaagaaattgacttcgatcccaaagtccactaccaaaaaaaattcaaattcaattcttggaaaaatgctccaagggattcaaaaaaagccctttttcgaaaagctgaactcgctcgatttggtcgcgacctgtggctttaagctacctcctaaaaccgatggcttgaagctctcaattatttcaatcggcgatcttcatgatgagtgtctgaaagacatccaggctgcaatcgacaaagagcttggctcctaccctattcccagaaccttaaggttcatcacacctgatctagccaccaccggatttcaggatgtagctattggccgaatttccaaacttgtcaacattaaagctcccggagccatgtatgactcatcaacgatttatcgagtattaattgatgacttgcatcgcaagggaactgtagcctttgattttactgactggaaaaatcttataaagaacaaaggaaccactcatggcgatgttgagcgggttatatcgtcctatacggagaagaaggggctcgaggcattcgagaaagacttggacgatattctcaaggatcttgaactgaaatcgaataagcggattcaggtacgcagagcgtttgaacgctatcacaacgccgtgcgcctggagcgttcattgattgccattgacaaccaacaagcagttaaggatgcggttgaacacaactttgaagtattcgaaaaacaaggcgtgatggattttatgaatctgacacttgaaattttgccagaggcaaccaaaaagaatctggtgaacttggagtcaatccaagcagccatcatttacgaactattgagcaagtgtcatgaaaaatga

SEQ ID NO: 92355 - DNA, 1764 bp, Pseudomonas aeruginosa; identical to SEQ ID NO: 92337

SEQ ID NO: 92356 - DNA, 1128 bp, Pseudomonas aeruginosa
atgctgggggaagaattggatacagaaaatggatcgccaggtagaaaccctcttgccgcagcacagagggaaagagctggtgcgcaaacattcgaaaagtacgagtaccagtaccactgggctctctgccgaattcttggtgctcatgaaaactcggatgattacgttgtctttatcgagcttcatgaggacgtagtattggcgacttcgaccgatgaatctctcgcgcggtttgaattcaatcagatcaaaaacgtcaatgctacaccttggaatcagaagaaattgacttcgatcccaaagtccactaccaaaaaaaattcaaattcaattcttggaaaaatgctccaagggattcaaaaaaagccctttttcgaaaagctgaactcgctcgatttggtcgcgacctgtggctttaagctacctcctaaaaccgatggcttgaagctctcaattatttcaatcggcgatcttcatgatgagtgtctgaaagacatccaggctgcaatcgacaaagagcttggctcctaccctattcccagaaccttaaggttcatcacacctgatctagccaccaccggatttcaggatgtagctattggccgaatttccaaacttgtcaacattaaagctcccggagccatgtatgactcatcaacgatttatcgagtattaattgatgacttgcatcgcaagggaactgtagcctttgattttactgactggaaaaatcttataaagaacaaaggaaccactcatggcgatgttgagcgggttatatcgtcttatacggagaagaaggggctcgaggcattcgagaaagacttggacgatattctcaaggatcttgaactgaaatcgaataagcggattcaggtacgcagagcgtttgaacgctatcacaacgccgtgcgcctggagcgttcattgattgccattgacaaccaacaagcagttaaggatgcggttgaacacaactttgaagtattcgaaaaacaaggcgtgatggattttatgaatctgacacttgaaattttgccagaggcaaccaaaaagaatctggtgaacctggagtcaatccaagcagccatcatttacgaactattgagcaagtgtcatgaaaaatga

SEQ ID NO: 92357 - DNA, 1764 bp, Pseudomonas aeruginosa; identical to SEQ ID NO: 92337

SEQ ID NO: 92358 - DNA, 1128 bp, Pseudomonas aeruginosa; identical to SEQ ID NO: 92356

SEQ ID NO: 92359 - DNA, 1764 bp, Pseudomonas aeruginosa; identical to SEQ ID NO: 92337

SEQ ID NO: 92360 - DNA, 1128 bp, Pseudomonas aeruginosa; identical to SEQ ID NO: 92356

SEQ ID NO: 92361 - DNA, 1764 bp, Pseudomonas aeruginosa; identical to SEQ ID NO: 92337

SEQ ID NO: 92362 - DNA, 1209 bp, Burkholderia cepacia
atggaggcgaatggggaggacggcttgagcagtatcgacggcgcggcggagcttttgtccgttgcaaacaatcccaaatactcagaggccggtggcgggcacggggccaagggcgtcgacttttcgcgcatctgggccgtcttccgaatgatggagttggagaaggcgagtgagccggacttcttactcctcttcgaatccgttcaggatgttgctgagcttgactccgtgacagccccgactcgggtgaaggtctaccaggtcaagaagaaggattctggcacttggacatggtctgtgctaaccggcaccgtcgaacccaaggctccgccggccccctcgacgaaggcggctaaggcaaacgctgcgccacccaagttggcgaaggcccccgacttcaaaaaggtccccgaatcggttctcggtaaactgcacctaagcttgaacgctttcacggctctgccggtagagggcgtatttctctcgaatcagggttgcgacttcccgcttaaaaccggggggtcgacggccaccgcgatggcttgctcgctcgctgacctagcaactgaccatgtgcagcttttgaccgacgccttagcttcgctgtcacccggcggctcaccgccggacctagcccgcatgaagctccagaaggtcgccatacacccggataacctcaatgcgcctgcaattgaagctgcgctggatctgctaaacgagcgtagtcccgggcacgctggccaagccaaggccttcgtcgaatcgctcctaatgaaaatatcgccccttactcggcgaaccgacacctgcttgtcgttcaacgaactcgtcaaggagcgtgggttttccaaaagcgcatttgtcgcagctctggcggcgctggagaccgtgcctgaccgcaatgcgttattcaatgattggatgaaccagcttcaaatagaagggctggacttcatgaccatctcgtctgtgcgcgtcgcagccacgcgcgcccagcaggagcgactcaccggaggaactgacgtctccagagaaatcgacgatttcagcgatgcctggattgcggccaacccgcccacatcgaagttgcggccgttcgtcgaggccgcgctagccgagctcaaggtccagttcagcgcccatcgcgaccacgacctgatagcccggtttgtcatgagagccataacaaaatgcgtggacccgaactga

SEQ ID NO: 92363 - DNA, 1707 bp, Burkholderia cepacia
atgcatcgcttccgattcaaaaacatctggctgctctcacatcaggagcacaaggcccgacacgtggagtttcatccgagcaagaacctgctggtgggcagaaatcataccggcaagacgacgctgattcggagcctgtttgagacgctcggcgccacgccgcaagggaagctcgaacaatgggacaagaacgctgtctcgctgcttgagttctctgttgatgacaagcgctacttcgcgcttcatcaggacggccggcgcgcgctttttgacgctacgttcaacttgctcatttcgacggctaagttcggcgaatggtctaagcgtttctgcgagacaactgacttcaacctagtcttctctgacaagagacaggcagaggttgtccccgctgacccagcatgcttcttcgctccgttctacgtgaaccaagacggaagttggcaggctgaatggaacactttcggtggtatgaagcgctttagcgcaccgttcaagccaattctcgaatacttcactggcgtctgcccgcctgaatactacgcagccagcgcagagaagtcccaacatgccaaggcgctcgaggagcaccgtcgggaatacaaactgctagagcgcaccatcgagcgcttcagcaagtctgtcccgctgacaggtcccaaagtcaacgccgacaactttgctgcagagatcgagcaactcaccaaagaggtcaatgagctcaacactcgacaggagcgccttaggagcattatcgtccgtgagcaagagctggtgaagagtctggatcatcagatacatcttgccgaaagagctttggctgcatacgacagcgatgcgaagtatcttcttaaggaaggcgcagatccactcatttgccccacgtgccacgccgagcatgagaagcccttccttgacctgctggagttcgccgaggatgctcgggtgcttcgggagcttgctgcacggctccgagaggatgctgcggaggttcgtactcggacgcacaaggcattctctgagctgaattcactgaacgagaactacttgcgcatttctcgtctgttggactcgcgcaagggagagctgaaattcaaggatgtcgtcggcagccttggcgccgagtccgcattcgcggccttcgaagaggagcgcaagctgatacaagctggcatcgatgccgtggttctcaccatcgatgcgcttgagactaagatgaacgagcttcgctcgctcaaacgaacgaaggcaatccttacggatttccgcgagcactatgcagccagtcgtattgcattgcaattgcaccccgtgccgaccaagaacatgcaactggcgtcgcgtccttcgctttcgggcagcggcggcccgcggtccatactggcttattacgccgccatctggcgtaccgtgcagggaaagtcgggtacgtacgacgtcccggtggttattgattcgcccaaccagcaggctcaagacgatctcaaccttccggccgttctaagcttcatcgcgaaggatctgcctaccggcatgcagctcatcgtcggcctagagacgccaaccaacttctctttcgaccgcgaagtgatcctcacgcagaagtatgggatgctcatcgagacagactgggaggccactctggcactagtgacgccgctccttagaaagatgtacgacgcaaccttggcacagagccaaagctag

SEQ ID NO: 92364 - DNA, 1164 bp, Pseudomonas fluorescens SS101
ttgaccatatcggctggtgcctcagagctgctgcttgtggcaaacaaacctggcctcactgaaacaggaggaggtcacggagctaaaggcgtggactttcagcgctggtgggcggtgctccggatggtggaaatggagcaggcgaacgagttggacttcttgcttcttttcgagacagtgcaggatgtcacggagctggactcagtaagtactcccacacgcgctcgtgtatatcaggtgaaaaagaaggaccgtggagagtggtcttggtccgttctcaccgggacaactgcccctctcaaaaagaaaagttcgacagttgtatcgaaggccgcagcaccaacgtttacaaaggtccctgacagcgctctaggaaagcttcagctcagtcttgctgcctttaataacctgtccgtcgaggcttatttcatttcaaatgccggatgtgacattccccttgcagctggagggaatgcggctacgtctatgccttgctcgcttgcagatttcgctcctgagcattcgaagttgttggctcaagctctgcattcgcttagtacggatggggcgcccgctccggacttgacgaagctcaaactgaagagagtcgctattcatcccgatgagcctagcagctacgtcatcaaatccgctctggagctattgacgcagcggagccctcctcatgcaggccaagctgcatcgttcgtagaatctcttgtaacgaagatttctcctctgggtcgtcacactgatacttgcgcatctttcggtgatctcgttgagcagcgtgggttcgcaaggcacgaatttatttctgcactgggtgcactggagaccattccagatcactctgcatatctgaatgactggctcgtacagctgcaaagcgaaggtatggatttcatgatggtgaccgccattcgcgcgcaagcagcgcgtgttgtacgtgagcaactcacaggcgcgacgctgccaattgttcaaagtcttcatgacttttgtgatatttggctggacgctaacgtgcgtggctcgggtcttcgactgtacttcgaggcgggtttagttgcgctgaaaaaggatttcagcagctttcgtgatgctgaacttttggcgcgctttgcaatgagggctataaaaaaatgcgtggacccgaactga

SEQ ID NO: 92365 - DNA, 1710 bp, Pseudomonas fluorescens SS101
atgaaaagcttgcgattcgaaaacatctggctgctctcacaccgcgacaagaaagcgaggcatgtgagcttccacccaaagaaaaatctgctgaggggacggaatcacactggcaagacgagtctcattcggagcatctttgagacgcttggcgccaagccacaggggaagctggagtcgtgggatgaaaataccgcatctctccttgagttttctgtcgatggatgccacttctttgcgctgcatcagaatggacggcgcgcgctgttcaacgccaatcgagagatgattgtcgcgacctcaaaattcggggagtggtctcaggccttctgcaatgtcactgatttcaatctggtgttcaccgataagaaggagtcggctattcagccggccgaccctgcatgtttcttcctacccttctacgtaaatcaggatggcagctggcagtctgagtggaacacgtttggcgggcttaaaagatttagctctccttggagcgcaatcttggagtacttcacaggcgtgtgtccgcccgagtattacagggccaaagccgagagagctcaagaatctaaagcgcttgaggagtctcgacgagagtacaagctcctggagcgtactatagagcggtttagccgaacgctacccttatccggtcccaagctcaaccccgagaactttgccaatgaaattgctctgctgaccaaagaggttactgagcttaatgaacggcaagagatacttcgaagtgctgctgtaaaggagcaagatttactctccagtctagagcagcagattcgattggccgacgaagctctcgcggcatatgaccatgatgccaagtacttacgagctggaaattcggagcccctgatttgcccaacttgcaatgccgagcacacaaaatcgtttctggacttgctcaattttgctgaagatgcgcgcgtgctccgggagctcgcagggcgtctgagggacgacgcaagcgaagtgcgatatcgatgcagcactgcgtcggccaagctcagcacggtaaacgaaaactataagcgtatttctgtattgttggatacgcgcaagggggcgctcaagtttgaagatgtagtgggaagtctgggggctgaaagcgcgttcgccgcgtttgaagcagagcgccagcttctgcaggaggcaattgataagacgctgggagtaatcgactctctagatgaaaaaatgaagttgcttcgtgctccaaaaagaacgcgggcgatattggaagatttcagatcccattacatgactgggcgtgtcgctctacagcttccccctgtagatgtatcgaagatgaagcttgccgggcgtccagatctatctggaagcggtggtcctcggtcaattttggcttactacgccgcattgtggcaaacctgccaaggcgcgatggggacttttgacgtaccggtcgtaatcgactcgccgaaccagcaggcccaggatgattttaacctgcctgctgtgcttcagttcattgctaaagacttaccagatggaatgcagctgattgtaggtttagagaccgaaacggacttccccttcgacagggagatccacttggacgtgaagtattcgatgctgcgggaagaccattgggctgagaccgagcgcattgtcgaaccgttactcgaaaagatgtacgtcatgatggagtctgacgtagcggaggtctaa

SEQ ID NO: 92366 - DNA, 1119 bp, Pseudomonas putida SJ3
ttgaccaagacaaataaagcagcgaattccggcgtagatgccctgctaggttttgagtttcaacgtaattgcgcgctgtacttattgctcactaactacacgcaaatcagcagccgagaatttttcttatgcatagaacatcacgatgactttttattctgctatagatcggactgcctgagcaacatagaatcgattgactcataccaagcaaaaaaactttcaggcggaatgtggacgattgatgcgcgattcgctgaaatcatagctaagatgcttgacgttggcaacgatctaaaaaacgatcccgcaccaaagtgcaaggactactcgcatagcttaactttcatatcaaataccgacataaaattaagctatgtaccaaaaaaagcagaaaagcaaaaaggcaaaaccgacgtaatccacctgctcaatgagcaaaacagcaaaagccgttacgatgacatccctgaagaaataaaaaacaaaataaaagagaaggtacgcgaacactgtagcaaggaatcaagcaccttcaacgaggcagagtttagcaatctacacatccagtgggtagatttcccccgcaacaaaaactctcaaaaagacatattagtcggcttgatgcatagaaaattccctcatattccagaccatctggcagcggtcgagcttcttctaagtctctttagagatgtcgaagccgtatacaaccagggcaaaatcatcaacctgctcgacaatgccaaaagggttgagggcatcgagataaagaaagcaattaatgttattgagacagagcaaaaagctttcaaactatggcgtgccaattcagcagagctaacacgaaagtttcgcgtccctctaggaattcaaagaaaccacgaaaactatatacgaaatactttcgaactcctaaaagacatgagcaacaacgaacaccaaataattaaaaccttcatcaaagaaaatgattacactctcgactttcactcttatgaagaaatgtttgacgcatacataaacagcattaaaaatactatcaacataaacctaaaggacattgatatcttctttgctgcgctatgtgcgtttgtagaatactacggcgagaattaa

SEQ ID NO: 92367 - DNA, 1764 bp, Pseudomonas putida SJ3
atgagtacaaccctaacgtttgaccggttatttgtcagctctgaaatacatgacgcctgcttctacagtgaattttcgccaggtgcgaatataatcagcggccgtaatacttcggggaagagctcactcatacagagcttactttacacatttggcgttaatgatctcaaagagaaccttagtgaaatccttaactgccagccaacattcagagtagacttctccaagacaactgaagaccagaaagaaaaatactcaatcataagaacacaaggctcgatttacgttaaagaacctactggcaaagtagtgcctttccatggaattaatgctgacaatagtgccgagcacatcgctctgaaggaatacgttcgtaacctggtcggatttaatctgcagcttgagcagaaaggggagctaaaatcagctccactcgaatgcatgttcctgccgtattatatttctcagtctgtaggctgggtgtatttgcgagagtcgttttcaaaccttcaatactacaaagggttcaaagacgactatctagactactacctaggcgtaagcaataattttgatcgtgtagagcacagacagcttacacaaagaaaagacaaactatcatccgacattagcaatctcagacgatacggaaaaaaagcggaattccaattcgccaaccttgtcgacgaagagttcggagcgcaggcagaggagtatattgacagctatgtaaaactgtcgaactcactggatgaggaaagaagaaagtacataaacctctgcaacaaactttccttactgcaaaatcaccacaagatccttaaaagaacaaaaagcaatattaagaaacaaaaatacaatgatgtagaccgctgcccggcctgcacacaaattctcacctactcgctggagggcttatacagccattatcaaaaatacaatgataccgtagaacttgagtcacacatcacagagcagcttacagacaggaaatcagagatccacacgtccagcaaaaaaatcacgaacatatccaaagaaataattgaaaactatggcacactattaaacaacaccatcgatggcgtctcttttgatcagtggatatcgaataaagctaacgttgtgctatacagaaaaatgcaagccgacattcagggattcgaggatgagcttgaaagtataaagacttctcttgattcaatgactacagaaaaggaaacattaaccaagcgaatcagtagagaagctgaatttaaaaagctttttgtaaaatacatgtcgctattggagctcaaaccgctgaccgacagtagatatctagatctttacaaaattagttctttccctaggcaaggggttgaacttcacaagactgtcatggcttatcactttgcgcttaactccttaatcgcaaactcaaaatctgctcatagactacctttcttgctagatgcgattctcaaagaagatattgacgaaaccaacctcaatattatcctgtcattcattggtaacaatttaccctcggacactcaggctttcatttctatatctgagcacgtcagagacgaggccggttctgatgagactttaaagcctatagaaagaataaaagtcagcattataaaagatacttacttcccggaaaactcgaagcttatttacattggaggaggcaaatcagaacgtagcttcctttctcagcctctcgataagcatcaagagatgcacatgaataccattgagataacggcattttga

SEQ ID NO: 92368 - DNA, 1128 bp, Pseudomonas putida S12; identical to SEQ ID NO: 92356

SEQ ID NO: 92369 - DNA, 1764 bp, Pseudomonas putida S12; identical to SEQ ID NO: 92337

SEQ ID NO: 92370 - DNA, 1161 bp, Pseudomonas syringae BRIP39023
atgaaacttcatgaagttagaccgagagaacaaagtgggcgagatactattgaccgcttcagagcgcagttcaaagcagcaagcttagaaagcctggcgctgctggaaaatggtgaaatggagagggtgtactgcgacattcatgaagactatgtcgttaaacatatagtaaactcgaaatctaaatatcgatttgttcaagtcaaaacaaagagcaaactcaaccatcaatatacgatacttgaaattttcgggttgaagaaaaagccgaaaatcagtcctattcatgacttagttggcagctttgtaggaaaactactcctacatgtcgataagtttggcgatgcttgcgtttcgattgagatttgtacgaacgtcaatttcgacgacgaagtagaaaaaatctacaaggaagtcaaggacaaattaagccccacacagaatactatggccttgattgaggagacgaagaagttgatcccgtctcttgccacaaaaagcaatagtgatgtaatagcctttctatcacacctagcattgacaccaagaaaacaaattctcaatgaagaggaagatgtcttcgtttcccaagcttccagccaaatatttaagtacagcgagattaacctcaaccctcttgaggtcaagcaaattataattcaattactttccttgattgaagataggtctgccgtcccactttcaagcagtattaccgaaaaagaattggatgcaaaagccagtgtccatctggatgatattttagatattctctgcatttccagatccgcttattatgtgctcagggcaggaggagatgacaaggctattaaatcagtatctattttgcaacgcatgttgaagcgatcaggtttctcggatgacaccgtagacacctttgcaggttttaaatgcagctgggaagcatggtatcggaccaataggcatgatcttctagaatttcgtttagctgtcgcaaaaaataagattataaaaatcgcgggaaaaatcgcaaccggccagatcgatatgggatctattactgaagagatttcaaatttaaccgtccaaatcagcaaagatcttggacgttcagacataagcgaagagttgatctttggcgccgtactttctgaacttgttaaaggggaggcgcaatga

SEQ ID NO: 92371 - DNA, 1548 bp, Pseudomonas syringae BRIP39023
atgatgggcgactccttcgacttgacaatcaaagttgataataaaacggaggatcgcttttacaatgaagatgagttttcaaaatccatcttaaaattgttaaatctgagaagtgacaggcttgtaacgaacggaaatactccaaccactccatacttctctgcactgctgcctcttttttatttagaccaagaccaaggctactcagaatattatgcccctcctcgccctggtttcataaaaaatcaattttcggagatggttaggttagcgaccaacttcccaccacagcattcctatgacaaaaagaaaaaagctatcgaggttaaaaaagatctagaatatttggatacaacaatagttgacagccgaaggctactggaacggctaggtaaagagcttccgtcaccagctagaaaaatcgaggagattgataggctcattgccgaatcgaaatcacgtcttgaagacttaaaaaaatcaaagaatatcaaaagcgactctctttcaagtcttgatcatgtgattggcaacttgaggaaaagacatcgtgagctgaattcagaggaagctattctaggatcaaaaatttccagcacaacgcagatacgtgaagagatactgagtgaaattgaaacactcaatctgaacgaagaagccaaacgggcttttatttcgttttccgatatatgcacatcaccttcatgtggaatatttatggtcagtgccgactcatacggaaagagtttgctttacctcagagaccagattaaagatcttgaaatttccacctcgtccaatatacagaaagcagaagcaatctcgaccgagaaaacatttattgaagcgcagatcgcacaacttgcccagcaacgaggattagcagagcgcgaagctggtattgagctattcattgaggctattagcagaatcgcatctgagatttttgagctaggattagaaaaaaataagctggaaaaatacgaacagcaaaaaactgagcattttgaactgttgaaaagacgggaagtgacgcttacgcttgaagactccttacaaacgtcgcgagaacagtctccggatattctgaagtttaggattgaactggggcaaaaaatggcagaatggctcgacatactcaattcaaaaaatatttcgagagacatcagaatcgattcggatctgaagcccatattgggtaccgaaaagcttgggatcatcaaaggtagttcaaaagcccggacagtattagcatttcatgctgcgttgtttgagttgtgtaccagcgatccactttccccattcagagtcttggtttttgacacgccgcgccaacaagagattcactgggaggatttggacgcgtatatccaggcactaaaagcagttgcccttcgtaacaatgctcaagtcatcttctcaactaccagctatcaatatgcgatagatcagaatacggacagagaatggttacccaaatttactggcgacgaacagcctatgtacctaggcaaggttggtcagcctacattagacgggacaccttga

SEQ ID NO: 92372 - DNA, 1179 bp, Pseudomonas syringae pv. syringae HS191
atgaatagtactgaagatttttactcaacaaagccccgcgaacaagtaggtagagataccttcttaaggtatagggctcagatacgagctgccgcgctagccgccttagagattttggaaggcggcgaagttgatagagttttttgcgattaccatgacgatttcgtgattggaaagaaggtctctggtaagcagcaatacgagttttttcaagttaaaactcgcgctaaaaccagtaagaattggacgcttaacgaggtatttggacttaaaacccaaaaaaatgcgagccactccgcagaaaatgtgaaggttagcttcgccggaaagttattgcagcatacggtaacttttccggacgtgtgtgcaaaaattgtatttatgactaatgctcacctggatgaaactgtcgaggcaatgtctgtaagcctagagcgtaatgatgttgccaataaatatttgagatttattgtcgataattttaacgactgcttcgtgttgaccgagcccaaactttcagagacccaaatacttgaaaaactttctaagcttagatttgagtctgacgtttcgtttataaaagataaaaacaatagcttcgagtccgatgctcggactaagatataccaatttagtgaaatcgatctggagtttaatgaggcaaggcagatactagtgaatctgttggagttgatgtcgaaaaaaacttcaggggtgatttctgtctttgatgaggctactattaatattaaggcaagtgttgatataaatgacttgcttgatttgttaagtatatctagagaggcgtatcattctctgattcaaggaggtgatgctagagcaattaaatcggcgtcagtaatccagcgtacgatgtttgcttctggagctagcaacgaggagattgaatattcgtcgagatgtaaaactgagtgggatgtttggcttcgagataatagaaataagctttccgattttgatctcctttctatagcttcgaaggttgacacgttacttgccgatacacttgatggcaccaaatcttttaggttaggtgcgctgcatccaaaactgaagcaattgatggtggatctggattgtctggggttggcatacgacttaacaccaccacttttgttcggtggatttatttctgccctggttaggtgtaaatcatga

SEQ ID NO: 92373 - DNA, 1761 bp, Pseudomonas syringae pv. syringae HS191
atgaggcttatcagacttcaaattttcccgaagggcgataatggatggagttcagagtcgttggtatttggccaagatatcactcaactcttcggtcctaatggctgtggtaaatcaccgctaatcaagtctatagttttttgtctcggctatccaagtaaatttcgagatgacattctcgagaactgcctgtgtgctgagttggaatttgaagtcaataatgttaattatgttgctcgtcgttattttaaaccgggactagatgttgttctaaccgattttgcaggagttaagcacgagtttttaaatgagctcgactactcgagatatctttttgagttgttagggtttgatatacctacattggtctctagcgatgaaaaaaaggcggcgcaggcgtacttttctgctttgctccctatctattatttagatcaagaggaagggtatcgtaagtattatagccctagcacttcctttataaaggatcagctttcggagtcgattcggattgttttgggcgtggcgccgaagaacgcatttgatgcgaaaaagaaactgattgacgctaaacgtgaactcgaacagcgcgataagcaagtatatgcactaaaaaaagaatatgaatcagccaaagatgtctacggatctatagattcagtaggaatagatgtggaactaaagtctttgtaccagagacttgaagagctgaaaagtggtacggcagataaaactgcctccacagacgctattgatgaactcattggatcgaataacgaaactatccgatctttagatcgggagctaggggatatctcaaagcgcgaccgtagctttcaaagaattcatgcagagattcaaaccgaaatcaatacattgagcctgaatgaagaagcgaaaagagttttttcttcttttgaggaaatatgcaactctccaggctgtcaattgttttcattcagctctgactcctatggtaagaatttactttatttaaaggaccagttaaaggatctggagcgcaatgttgagattgggcgtgggaggggtgaacaattaagtcttcgtcggggtgagttggtagctcaaactcaaagccttactgaacgacgaaattccttggttaatacttcagatattaaagctctggttgaagcgattacccaaattacatcaaggatatttggtctagagcaggataaaaagtctttagattcgatcgaagatatttcggatcgctatgttaaagctttgtccgctcaagatgaagctattaatcgaagggaagaactagaaaaaactgggcaaggtaatcctctcatcattagatttagaagtgtgctgagagagaatatgcttaagtggatggatatactcgatacaaataatgtttctagcgatataaagtttgagggggatttcgtgccaattttaggcagcgagagattagctcagttaggtgggagtactaggctccgtgtgattcttgcttatcatgcagcgcttcttgagtgttttgagttttttaaaagaaagaaagtgtcgtttattatttttgatactccaaaacaacatgagatgcatggggtcgatctggggcgctatgttgatgcgcttaaagtattttcacgtgcgacaggtgttcagattattatatcgggaactgaatatcattatattggagatgttagggataaagattgggagcctaaatttcctgggtctaagcaaaagatgttcttgaagcgaggtcgattgtaa

SEQ ID NO: 92374 - DNA, 1203 bp, Pseudomonas syringae pv. actinidiae
atgctgaatcagcgccattcgagggcggtcaaaccccctccagatgaattggccgaactgctgctagataagcccgatgatgaaagtaaaggtgcagaagctactattggattctcctatcaacaatggtgggcaacactcatagctcttgaaatgctttcagtgcatgacgattatgcgttgggcatggaagtaaaagaagatgtggccattctagattcgtcgacgaagccgacccgtgtggagttttgtcaaataaagaaaaatgaacaggcaggagcgtgggcattaagtgatcttcataataaaggtgcaaagctaaagaaggggcatgagccttcaacgctggcaaagctatataaaagaaagattgatttttctggtcacaatgtatcattgagatttgtttcgaatgtagggtttaaaatttcagcgataggagtgctgaaaaaggtacatagtgtggaagctagattaaaagagctagaattggtcgacaaggaattaatagtcactgcaattagtagtcagctgaaaattgaaaaaagttcagtatcaatcgatgagattagactgcatcgctcaaatttgccgatggcggaacaagaaatatttgttgccggtaagattagtcagttgtgggaagagagaattcttccttttcgcatagatcagccaaccgtcgcagcacggttcctggcgtcagaaattcagtctagggcagcaagtaatagctatgctaaaaatatgtcggacttacaagcaaggataatttcgaggcagcaagtaatggttgctttgtcaaatgtggcctcggcaaaaaaaagtgtcagtgaagtccttgatagtgctattgcgacactggagtcagaaaaggctgtttttcttttaataaaaaaaattaaaaaagaaagaataacgatttgtgctgattcggctgatagaactaatctgtattttcgagatataattaaatcattgcatgaaagtatggaattgtctttagagacagctgacgataatgctggcttgttgcagcttatgaaccttgttgttgagagatgtactgctaaaaattcattggctttcatgggggtttcgaccccctatcttcatgcggcggcattattggtacttaatgatggaatcgacttcgacgtactcactgcttcggttggttcgcaatctaaggcagaacaatga

SEQ ID NO: 92375 - DNA, 279 bp, Pseudomonas syringae pv. actinidiae
atgaaccgaaaactgatattcaaaaaattatggcttctatcagaaaaagagagcaagggaaagattcagccattaaaagaaggtaagacccttttacttgggaagaacggtactggtaagtcaagaattactaaaaacctattttgggtttttggatgtgagccgaataaaaggaatatgggtaaatgggatcctgacaccatcgcgggtctggattttagttttggaggtagagagtattttgtaatgagacgcggtaaaaagctagcgcatttttaa

SEQ ID NO: 92376 - DNA, 1170 bp, Pseudomonas syringae pv. cilantro
atgcttgatacaaaaaaagccagggagcaaaacggtagagactcatttagtagatatcgtgcccaggtgcggtctgctgctgttgcttcactttcgatccttgaaggcggaactgtagatagggtttattgtgatctgcatgatgactttgtgatcaggaaaaaagacggtgatggatttacttatattttttatcaggtaaaaaccaagggaaaacagaaccacaattggacaattaatgaagtctttgggctgaacactcaactgagagatcagtcaaagcaaaacgtagacgcgtttaaaggaagttttgttggtaagcttctgcttcatgctgttgtctttgaccagtattgtaactccgtaatatttcagacaaatgttaataatagcgatgaggtcgaagatttgttatcggatatcgagtccggtatctttgctcataaattttcaaaggttatgttggatcgctttaatgaatgctttggtgagaatgctaactcattcagctctgagcaagctaagtctatgttgtctaaattgtcttttgagtctgatgtatcttttttgaaagagggcgataactactttgagttgatagtaaaggagaagatttatgaattcagtgaaattgagcttgaacgcgctgagtttagagagattcttttgagactactcgaactagttgagagaaaatcgagcggcgtcataaaaacgtgggacgccaactccatagagagctgcgcgggtgtatctgtagatgatttgctctctatattaagcatttccaaggatgcatactatagtttgttgagtggtggggacggcaacgctataaaatctgcgtccatgatccagcgcgcgttgaagtctagtggtgctgatatctcaatgatcatgtactgttcaaagtgtaagacagattgggatgtttggtatagtagcgctaggcatgtaatccaagagctagatcttttatcaatatcggagcgtgtctctgctatcctatacagcacgatgaatacgcagggagtgctaggtatgaacagcttgcgtataccgataaaaaatttgctagtcgaactggaaagcgaatccctaaagtttgatctgactaacgacctcatactgggcggtgttttctctgctttggttagaggtaaatcatga

SEQ ID NO: 92377 - DNA, 1770 bp, Pseudomonas syringae pv. cilantro
atgaaacttgtcagtttgaaaatatttcctaatggccaatcaggctggggttcagatcttctgatctttggtcgtgatgttactcagctgtttggcccgaatggatgtggaaaaactccactggttcaatctattccgttttgtttaggttttccaagtgtctttaggaatgatatatatgacaaatgcaaatgcgctgagcttgtagtttcttctgctaagggggaattacgacttcgtcgagtgtatggaagagatcttgacgtagaggtggttgagcctacaggaggggttcagaagttttttaatgaaagggattactctcaatacattttcgattggcttggcattgttactaataatttggtaactacagggaatcagcttggtgcagcctatcttgcaacactgttgccaatatattacttagatcaagatgtcgggtatagtgagatttactgcccgcctggtaagttcattaaagatcagttctcggaaatgatgaggatggtttttgatctgcctgtaaaaaattcatttgatgtcaaaaaagatcgttttcgagctaaggagcgtttggagttcctggataaggatgctcagacatttgccaggatggtagatctagctagaaagaatgtttcagagatcaccaagtcaaagtcggagatactagccgaaatttctcagctagaattcgagttggatagtcttcaagatgtcggagttagccgggatgactctgttaatgctctagatcggattatctatattcatagaaataatattagagaaatatcggcagaaataaatcaattacaaaggcgtaatttgggtattgggaagattgttcaagagattaatacagaaatcgaaactttaaatttgaatgaggaggcacgtagagttttcctatcattcaaggagatttgtggggctgacctgtgccagttgttctcgtcaagctctgaatcttatagtaaaaatctactttatcttcgagatcaaattaaggacttggagcggaacgctgaccttgatgaagttagagtcggagaactaaatcgtcagcgcgatgctcaagagcaagcgattcagtcgttagttgacgcgcgtaactcttctagcgcaaaaagtgacatatccgctttggttgaggctattacgaggcttaaaacagaaatatttacacttcaggggcagctaagcgaacttgagaaagtgacagctctagagggaaagcattttaaagctatcgtggagcgagataaagcattgacgttgtacgagtctttttcagtgggtagagcgtattcgccagatttgattagagttagagcggatattcgtcgtaacttcatagagtggcttgatgttctgcatacaaataatgttagcagggatataacctttaaagatgatttttcgcctctgctcggtgtggaaacaatatctcaactcaaaggtagtacgaaaattcgtgccgttttggcatatcacgcggcggtatttcaagccttcgcagagagcggggtgttagggtttaagtttatgattctggatacacctaagcagcatgagattcataatgatgatttgggtcgttatttaatggctttgaaaaaactatgtagcgatcgtggcgctcagatagttttttcaacgactgaataccactatgatggtgatgacaatgatgcggagtggctgcctacttatgatggagaggagcagaaaatgtttttgaaagtgggtggtgttatagcctag

SEQ ID NO: 92378 - DNA, 1119 bp, Xanthomonas translucens
atgagttccaacgtcatcgctgaattcatgtcctctgctccgctagcagaggaaggcggcgcgatctcggcagatcgattcgactaccagaagaactgggctctcgctcgtcttctgagcttgcatcagggcgacgggaactatgtattgctctgtgagctgcatgaggacattgccgtccttgactgttccgaagaaccgaccaaggctgtcttctatcagatcaagaccagcgcaagcggcgcctggactctcaaaaagctaacgaatcgaaggaagggtaaggacggggcctcgctgccgtctattctcggccggctttgcgctaaggcatccgagctcaaagagcagcaggtgacatttcagttcgtcacgaacgtgggcagtggctttagcttcaaggcaccattggcaacgaaagcaactgagtcgtccgggcaacgactgttcgacgctcttaattccagcgagtggaacacgctcaagcagtgcctcgccgatgagttggggcaagacttgagcattcctcttcaggatcaattgaaggtttcgattgctcagattcacttaggcacgcacaacgagaccaccgttgggcttgtggcgaactttttagaagagcatgtgccaggtgcccatattcaaccgaaggcattctaccgaacgttgttcgatgagttacggcgcaggaccgtcgctaaaagacctgtcggacatatctctgacgtatgcaaaatgaaaggcatcgacaggcaggcgttcgacttcatgctggccagtgctcgatcggttgcaccagctgctggagcttgggcccaaattcaggttgagctccaccatgatggtgtttccctggccttaaggcggaagctcaaagaagcttaccctgcctatttctcaaggatgcagagccctctggacgctgcctttcgtagagaccatcggcttcttgtcgcagccagtgagagcacgatgtccgagcatcaaacgcttctggaattggccgagggagcggtgaaaattgcccgaaaggacccgggctatggcgctgccggcatgtctgccgaacaggaactcattgttgtgatgatggccttctatgaaaccgacacccactaa

SEQ ID NO: 92379 - DNA, 1503 bp, Xanthomonas translucens
gtgatctccgccttggagttcaccgtagacgcaatcccttacattttactgagggaaggcaagacgttcaccttgatttacgcggacaaggttgtcggctgctatacgagcgtcacggagggcttggctccggctttgtatgaccttttgggggcgaaactgaggctgaagaaccgctccgataaggtggtggtgccgcctccggcgttcctgttcattccgttttacgtggaccaagatgcgggttggaatcagcctttgacgtcttttgcgcgcctcgatcagttcgccagctggcaacaggacgtcgttaactttcatgtgggagtgacaggtgctgaatactttgaggcgctagaggcccaagcagacgctacggcggcaagggttgagccagctaaacagctggagggcctgaagtcgcttcagaagcgtgcccaggaaacggtgcttgaagacatcgatatggagattgatccagacgtctttgcagaagaaatcgagagggttgttggattgctgcagggcttggtagagatgcgcgaagaggtgcgagccaagctttccaagctaacgcaacgcagactggagctcgaggcccagaaggagatacttgaaagggtgcgcagagagcttcatgccgactacatgtttgcggttaagcatgagggcgacgaattggagtgtccgacgtgcggccagctccacgaaaattccttcgcacaaaggttcgcccttgcgcaggatgaaggccgtgcagatgatgtgcttgtcgaagttatgaatagcctggctgatgtgtcgggccaaatcgctattagcaggcaacgcttgaaggatgctacggaagacgagcagaagttcaatgatttgctgactaggcgcagaggccaagttacgttcgccaggcttctcgaaagggccgggcagaagcggttctcttctcagttggatgaacaagttgctgacctagttcgagtaattgccgacttggactaccgcatcaagcaagctgcagagcggttgcgaagcgcgcgttcaacgcatcgcaagaaggaggtcatcgagagctacgcgggactgctaaagagcttcgcccaggcgttgagcgtgtcgttcccggacgagttccttggatcactcacggcaaagttgaatgagacgggtagtgaccgcccgagagctattctggcgtatgcctatgccatccttcgtttggtgtgggaggctgaggacgcagtgagatgcccgatcgtccttgactcgcccaaacagcaggatcaggatgacatcaaccatatcaagttacttgaattcattcgggacgaacgcccatcagattcgcaattgatcttgtttctggtggacgatgcagaggtcgatttcggctgtaagccgctcgttcttgatgagaaacattccttgctttctgcgggggaatacgagcagacgtcaagcctgatccgaagttggcagactctgcgagagacctctatgaattag

SEQ ID NO: 92380 - DNA, 1053 bp, Agrobacterium tumefaciens CCNWGS0286
gtgacgataatcgaagacctgatgaaaataccggaacgagagaatgccggcagcaaagcctacaacgcctttgattatcaaactgcttgggggattatccatcttctgaagttgcacgccacggccgacgactacgcccttgcttttgagtttcatgatgacatcgctgaactcgatagcgcgaatgcccccaccaatcttcgattttaccaggtcaagacctccgagaaagcgacgtggtcactcgcgaaaattagtcagcggcgcggggcgggaaaggtcaaatcgtcctatgcgggccgaatgttcgacactgtcgtcaagtttgggaatgccgttgaaaaagtcgttttcgtcaccaaccaggctctgactgacgccgatcacggcgatgaagaaatacccttcggttcagcaaaaccacaaaaactcaaaaagttcgtagctacgcttgcaaaagagcaggagaatttcagcgcccagaaccaccttccgctattcagattcctgcaaagcacgctcaatatctcgaattttgacgcgactctcgttggggagtttacgaactttctcgaaggcgcagttggcagcggggaagatgcccgcacattctatctgatgatgtcagacgagtgccgtcgcaaatcccgccgactgtccgatctgagcgggctagaagagctcctcacttcaaaattcgtgactcgagcaggcttcgaggcaaagatcgagtccttcagacaccggcgcgaacggcgtccaaatttcaatgcggcgcagcctcacctcaacctcggctggcgggaggagattgaactcgaacgggaatggaggaactacgaaatggcgagacgagagcgcattcacgtctccatgcttcgtttcggcgacgaagtgaaaaacatcgttgaacccatcatcaatgcggccaatactttgatggatggggtcatccaggcggcttccgctgtaggtccgttggttgaaatccaattcggaccgccgcggccggcctttgtgcgcgccatcatactatacgagttcatgcgatga

SEQ ID NO: 92381 - DNA, 1695 bp, Agrobacterium tumefaciens CCNWGS0286
atgaaaagcttgcgcttcgaaaagctggaattgctgtctctcgccgagaacaaagcccgagcgatcaagtttcaccccagaatgacagtcatcaagggagcaaatgacgtcggcaaatcttcggtcatcaagtccctgtattgggctttcggtgccgagccgaaatcgatccacaaggcgtggcgagacgccaatgtcaaagccatggtgtcattcaatgtggatggcaatccgtactccatcctccgcagtcgggatacgtttggtgtattcgatggtggtgggaagcttctgctctctacggcaagcgtgacaaaggacttggccccgtttatcgcggacctgattgattttcgcctggtcctcaatggacgtagcggacagccagaaacgccgccgccggcctacgccttcctgcctttctacgtcaatcaggagggtggttgggagcgtgcattcaattccttcgactatctcgggcaatatcccgatttcaggcaatcgatagtcgagtaccactccggtatcctcggaaacgactattacgagctggctgcggaaaagcggaagctcacgctcgaccaagatgagatttcccgagaccgcaaagctgttgcgaaggcgatcgaaaaactcgggatcgaggtgacattcactgggcttgagttaaatgcgcctgagcatgagcaaacggtcgagcagatacttgcccacatgaagaagattagggccgtccgccagagccgcgctgcggaattggcggacgtactcgaccaacggcagtcactggaaagccaagtcaaaatcgcacgtcaagcgatctccgaactcgaaagagacgcaacatacgcagcggcgctggatgccgaagaagttctgtgtccgacgtgcggaaccacacatgaaaatagtttcgcgaaccgctttgccattctcgatgatcgggaagcgtgttttgagtttctgacatcgagtagggaaaaacttctgaagctagctgaagcggcggccgctgccgcgcgaagcgttcacgacgtggacgcgcgtcttgatcaactgcagaccctgcttgcggagcgccagagtgacgtttcgatcggcgagatcatccaatcggaaggaaggcggacagcccgcagcatgttcgaagagcagatgagagacctcgacgagcagtttggaaggcttttcgcggaaatctcagccatcgacgttgagttgaaggaactcaaaaaacttgcccagaaggatgacattgaaggtttttttgcgcgattgatgttgaagtacctagaggaactcgacgttaagaaaatcgatcacgccgtggcttcgaaaatcgacggacgcgtcaaggaatcgggcagcgatcttcctcgagctgtcctggcttacgacttggctttccttcaaacagtccataaatactcgaaggcctttaccgctccggccatcttcgacagcccaaatcaacaggaccaagatgacatcaacgtcgctaagatgatcaggctgatcgtttcggagcgccctaaggacggccaaacaattctcggaacggtatccctgcatgggatcgagatcgaggatgcaacagttatcgagttcgacgaaaagctgtcggtcctgaaagcatcggatttctccgaaattcactcccacctccagccatttctagcccagatgcaggcgtga

SEQ ID NO: 92382 - DNA, 1065 bp, Sinorhizobium fredii NGR234
gtgaagctgatcgacgacatgatgacggtaaaggagcccgagaacggcggacgcaccgccatcgaccggttcgactttcagaccgcatggggcatatccaaagttctcaaactgcatgccgccgatctcaattacgccgtcgcctttgaattccatgacgacatcgtttcgctagacgacgccgacgcccccacgaaagctgtcttctatcaggtaaagacacaggaagcgggaaactggaccatcacaagactggttgaccgtcccatgagcacggggaaggtccctaaaccgaaagcctcgttcgtcggtaagatgttcggcaacttcaagcggtttggaagcgccgctgaaaagctcgtctttgtcagtaaccaacccctcgtcgaaatcggcacgaagtacggcgaggccagcttcagcacggcgaaacccgaagacgttgccaagttcgtgacggcaatgaagctcgaaaataagggcttcaaggaagtcgatcaccttggctatttccatttcgattactgtgaactcaacctcgcaagctacgaacaagccgttttcggtgaggtcagtctgttcttgaaggaccacaccagtgccgaacccggttccgtccctttcacgcttcatctcgcaaacgaaggaaaaaggcgttccaagcggctcgcgaatgtgaagagtttcgccgacttgaaagcgtcgaaattcatgacccgggcagacatggacaagtggctcggggcactggacagtgcgtatctataccggccaagctgggaaaccacctcgcggcaactcgcggttccacatcaggaagacagcaggctagagcgggagtggaacagctacatggccgaacgcaagcgccgctggagtgctggcaccctagagcttgcggcaaacgtgaaggaaacagtcacccccgtcatcgacgccgctgccacgttgaaagggggaatggaagggtgcttaccccttgtctctgacgaagtgaggcgctggaagcccaatgcgaccgatgacttcgttaaggcggtcatcctctacgagtacaagcgatga

SEQ ID NO: 92383 - DNA, 1689 bp, Sinorhizobium fredii NGR234
atgaaaaacttgatcttcgaaagtctggagttgctgtcgctgaccgaacggaaagcgcggaaggtggagtttcatcccctactgacggtaataaccggggaaaacggagtcggaaaatcatctctgattaagcacatatactggaccttgggtgctgcgccagccgtaattcatccgaaatggaagaaggtagccgtcaaggggctgttgacgttcacgatcgacggcgtccgatataaggctctacgcaacaaggaccgcgtggcgattttcgacgagggagatcgactcctactgtcgacgaactccttcacgagcgaactcggaccgttcttggccgatcttctcgacttcaatctcgtcctctccaatagaaagggagagcccgagcagccaccgcctgcatatgcgtttctgccgttctacgttgaccaggacgcaggctggtcgaagcctctgaattctttcgaccgcctcacgcagtactccaacttcaagacttccgtggtcgaatttcattcgggcatcagaccgaaccgatattacgaattgactgcgaaaaagaagcagctggacttacagaccaaggaactcgggcaggatcgcaccattgtccagaacgcgatcagcagactgcggcttgagccgggtttcagcggtgttgagctgtctctcgaagaccatgaaaatgcgatccaggacttactcgtcaaggtcaaatccatacgagaacttcggcagacccgtgcggctgaacttgccgatatcgttgaccggcgagtgctaatcgacgagcagatcgcgatcgtcgaagcatcgattgctgagctgtcagaggacgcgcagtgggcgacagacgacattcgggataaaatcccttgcccgacttgtggcacgatgcacctgaatgatttcaccaaccgtttcgccattttgacggatcgggaggaatgcttcaccttcctcagcgacgcccaacagaagaagcggggactggccaagagtgtcgaagaaatccagaggcaaattcggtcggcggacgaaacgatcgcggagattcaggcccttctcgatgaacgacggggtgacgtcacccttcgtgagctgatcgagaacgagggacgccgcacggcggcggccctgcttcgcagccagatagatgacctcgaaactcagatcggcaaaatcgtttctgagatatcggatatcgacaccgatatccgcgagatcgacaatccatccacacggcagacagtcgagaagtactacgcggccttcatgtctcagtacatgaaggcgctgaatgtgttggacgccgacaacgatgccgttacgaagatcagcggccgcatcgtcgagacggggagcgaacagccacggctcttgctcgcctacattctggcattggatgtaacgatccgaaaattctcgacggcgtttgcagccccgttggttatcgacagtcccgtccagcaagagcaggacatgaccaatgcaccggcaatcatcaagctcgtcacgtcggcaagacctcatagcggccagacgattatcggaacgatctcgctccacggcaacgcgatcgacgccagcatgctgcgcgagttcactgagaagaagtctatactgtcgtcaggagagtatgaggctgtctatgcaaggttgtcgccgctgatagagcgaatgtga

SEQ ID NO: 92384 - DNA, 1158 bp, Methylobacterium extorquens DSM 13060
atggcgactgatttcttagacgagatcgtaggcgtgttcggcgatgccgaaataggagagacaggcggcggccatggccagaaaggtgtcgaatatcagaggaactgggccatagttcagatgttcgtcctagaagagcaaggcgtcaccgactttcttttcttatttgaggctatacaggatattgcagtcctagactctccaaattccccgaaaaaaattgatttgtatcagataaaaaagaaagatcgaggtgaatggtcttgggccggactcacaaaactacatcacccgcctgatccgacgaaaaaaacaaaaagtaagaccaaagccaagcctttaaccgatgtggcgaatagtccacttggcaaattgcattcggcagtgcattcatttaatttactagatagttctggaagatttatttcgaatgctggttgtgacatcgctatggcggacggctcgaatgcggcaacttctctacctgtcgcactagcgtctcttccagcacacctcagcagtctgctaacagccgcctttattaccttgcataaaaatggcgctgcgccgccagacctgtctaagcttgtgctggaaaaagctgatctcccagttgacagtacgtctacatttacgattggcaaggcacatgcattccttgcaaaaagaagcccaaaacatgctgggcagtctcaatcgtttgtagatagcttgttggcaaaaatcggcccgcttggcacaagaaccgcaaaatgctcgacattcgaagagatgaaatcgcagcatggatacacgcgggatgagtttgttgaagcactcggcgcattagagggcgtcatagatatagattattacttgaatgcttggctactgcaactacagcaagagggcatgggtattttggaagtgaccagcatacgtgctgcagttacagggatttatcgtcggcaggtaatgggtaaaggattacctgaagaagttcatattgcttctgcatgcgatgagtggctcctaactcatgaggatccgcccaaactcatgccatttttcaaagaatccctgctatatttgctaagcaaattcccgtttagcaagccagctgaactacaggcccatttcgctctgagggcaattaacaaatgcgtggccccgaactga

SEQ ID NO: 92385 - DNA, 1704 bp, Methylobacterium extorquens DSM 13060
atgaaaaccttcaaattcaaaagtatatgtctactctcgcaaagcgagcagcgggcgaggcgcgaaacgttcgccccgcgactgaatctaatagccggggagaaccacaccgggaagtcgagtctgattaaatctctatttgtagctcttggcgcccgccccgaaggtcgattagagaactgggataaaaatgcgatcgcattggtcagttttacgatagatggtaatttatatcatgtgctacagcagcaatcctaccgcgcgctttacaacactaatggcgattgcacattcgctacaggcgtcagtgcagagtggggagccgaattttccaagctcgttggcttcaacttagttctaatagacaagaaccaagaaatcgttagtgccgatgcccgcgcgtttttcctacctttttatctgaaccaagatggtagctggcaggcagtttggtcaacgtttgcgaacatccagcagttcaaggccccggtacaaccgattcttgattatttttccggcgtcaagccgccgaaatactacgaaattagtgcccttagagatggtgtaaatataacactcaaggaattgcggcgcgagcacaaacttgtttcgcaggtacgggaacgatttggcaggactttgcctttgagtggcccaaaaactatgcctgatgtctttgaacaagatgttaccagactcacggatgaagtaacaactctaaatcaccaacaggaggaattgcgcaatacactagttagagaacaagaagtttacgacagtcttcgcctccagatccatatggctcaggaagcactccgaacttacgatggagatgcctctttcttacgcacggagccccacgatacgcttgtatgcccaacgtgtggcgcacagcatcacaaaatgtttatggatattttgaactatgccgaggatggccgcgttttgcgcgagctcataattaagctccgcaatgactctgaaaagattcataaggaatttgtacagacacaagtccgcttgcgtgaacttgatgtaaattacatccgtgtgtcgcaggtgcttgaggctcgtcgaggagatctcaaatttgatgacgttatcaaaagcatgggggcagaggttgcttttacagcttttgaggacgagctgacagaattgaaaagccagatagatcgctgcttaggcgaaatagataatttcgaagtaatgctcaacgaacttacgagtcaacggcgctcaaaagaaattctaaaaatattcagagactcttatgcaagtgctcgcgtgaagttgaaccttccgccagtcgaaacgaaaaatttgcgcctaacaagcaggccaaatttatcaggaagcggtggcccgcgctcaatcttagcgtactatactgccatttgggcaacaacttctggaaaatatggatcttttatagttccactagtcatcgactctccgcaacagcttggacaagatgaaaaaaacctaccaaaaatgattgaatatgtagcaaagtttctgcctgagaactctcaggtaattttgggcatcgaaggtagcaccgaagaaaaatttgaccacattatcgagctaacttccgcctacaagcttttgcaggaagatcaatacgagcaagtcaacggtatcatacagcctttccttgatcaaatgtatgctcgaattttttctgaagactcagaatag

SEQ ID NO: 92386 - DNA, 1152 bp, Komagataeibacter hansenii JCM 7643
gtgtctgtgggaatttcagaattttttacagtttcccagcgtgctgaaatttccgagaccggtggtgggcacaaccaaaaaggaatagaatttcaaaaaaattgggcattaataaaaatgcttgagatggaaagtaataattcagaagattttttatttctatttgaggctgttcaagatattgcgatattagattctgaaattgatccgaaaaaaataaaacttttccagctaaaaaagaaggaccgaggtgagtggtcttggtcgggactgagttgtttaagcaaaccagaagacccgcagaaaaaaaagaagagcaagaggaagagtattcctctcgaaagcataaaatctagcccaattggtaagctctataatgctgtagatgcttttaaaactatgtctagtgaaggtcgttttgtttcaaactctggttgtgacttattgatgaaagatggttccaacgccgcgacgtcaacaatggtaagtcttgatatgcttcccactgaattttcagaccttctagttaaagcacttcagagttttgatcctaatggatcattacctgatacctccaagctttatatagaaaaagtatcgattcctgtagatgatcctgtgccttattcgataggaaaagcttgtgagtttttgcgtaatcgtagccctttgcacgcaggacaagctcaatcttttgttgaaagccttctaataaaaatcactccccttggagcgagaacggaaacatgtagaaattttgaagaaatgcgttatcggcatggatttggacgcaagaattttcaagctgcattaaattcattggaaaaaattattgatcctactccttactatgattcttggttaaatcaattacagaaagaagggtttaacttgattgaaattacagcaatacgaatagctttaactgaaattagtaggagaaaattatctggaacgaaccttaaagaggatatagagatagagatggaagtaaaaaaattactacctgtaaacccaataccacctatactccagccttggctggaaacactcacagcctctcttgcagaaatgtttccacatgaaaaaaaagcaaagctgagagcgtatatcctgtgtggagcgatcgaacaatgcgtggacctaacttaa

SEQ ID NO: 92387 - DNA, 1695 bp, Komagataeibacter hansenii JCM 7643
atgaaaatcttcagattcaaaagtatttcactgctatctcacgccgagaaaaaagcaaggaggataactttcagcccccacagaaatctattagtcggaggcaatcacacaggtaagtctaccataataaaatctctttttatcacattgggtgcttacccagagggtaagttatctcggtgggatgttggcgctattacgttagtcagctttacgattaacgagaaaaattattctgttctttatcagaaaccattgagagcattgttcgatgataaaggatctttattatttttaacatttaaagatggagagtggggaacatatttttcacaactcctcggatttaatttggctctgactgacaaaaataatgaaactgtaattgctgacgcaagagctttttttcttccattttatattaatcaagatggaagttggttttcaggatggaatacatttagatatatggggcaatataaaagtccagtaccgagtgtcttggattattttacaggagttaagcccccagaatattatgaattaaattcaatgcgaaggactaagttattttcgcgggcagatatcgtgcgtgataagcttttagtggagcaggtaaggctgcgtctaagcaacaaacttccgttaagcggtcctaaagtagtccctgaagcttttgagcaggatattagccgacttacttcagaaataactgaattaaacgcgaaacaggaagataaacgcaatgagttagtcagattgcgggaaactgtttcaagcctgtttcttcaaattcagatggccgatgaagcgcttagaaattataaaaaagatacacgttaccttcaatcagaccatgatttagatcttacttgtccaacttgtggtgctgaacataacaaaatattctttgatctattatcattcactgatgatgcgcgagtgttatttgatttatcagtccgcctgaaagaggatttaatagatgcgcagaataaagttcgtttgaaagaagtagatctaaaaatattgaatgaaaattatgttcgaataaataaaattcttgaaataaaacgtggagatttgatttttggagatgttattcttgggatggggggcgaagcagcttctttggcttttgaagaggaattaagtgaattaaaatcaaaaattaaagaaataaatatagaaattgagtcgattgacgctgatatagctgtgttagtgagtagaaaaagatcttctgaaatattaagtaatttccgcatttcgtttgaaaaatcggcatcattgctgaatgtgtctttcgaaaactcaaaaaagatgaatctatcttccagaccggatgtatcaggaagcgcgggaccaagatctatacttgcatattatgcagccatttggagtaattgttccggtaagtatggttcattttcagtacctttagtgattgactcacctcagcaacaagggcaagacgaggaaaacctgcctaggatgatcgcttttatttcttcacatttactgggaaacaaacaaatcattcttggcgctgaagctacgacacaagagacttttgatcatgtagttcgcttgagtgcagagtatcgacttttgcaagaagatgagtgggatgaggttaaagatattattgatccttttcttgaaaaaatacataaatatactatagaaaattaa

SEQ ID NO: 92388 - DNA, 1098 bp, Acinetobacter baumannii OIFC047
ttggcagaaattaaaactataaaaaccgcaaaccctttagctgttgttcaacgagaaacagcaggtgctagcacttatgggaaatacgaatatcaatatcattgggctttaggtcgagttttagatgagcattcaaattcaactgactacgttgtttttatcgaactgcatgaagatgttgtttattgttcatcaatagatggatctaaagtgcaatttgaattcaatcaggttaaaaataaatcttcttcaaaatatacaaataagagtctaactaaacgtacaaaaaaagattctaattcagtattaggaaaaatgttattaggtattaaagataaaccttatcgcgataaattaatcagtttaaatttagtggcaacttgtggattctcacttcaacttaatggtgaacctttaaatcttgaggtcatcaaaatcggtgatttacatgaagaatgtattaatgacattcaagttgctattgatgcagaaatcggcgataaaaacttacctgatacactttcatttattacccctactttaccagcaaaaggatttcaacaatacacaattgggcaaatcacaagtttagttaataaaattaaggctggagcaaatcataacgccgaatctatctatcgcttattaatggatgaattacgtattaaaggtgctgttacatatgactataaactctgggatgatctaatccaaaaaaaaggcttaacaggcatcaccgtcgaaaacactatttctcaatttacacaaagtaatgaccttcaagttcgcgagaatgagcttactgaaatccttaatgagctaaatttcaaacatcatgaaaaagcaaaaattagaaaagaatttcatcgttatcattcctcttccttacaaagaaaccttgccgtactccaagaccatgaaataatgaaaaatattgtaaatatcaattattcagtttatgaggatgaaggattagaaactttcatagacaaaacaatggaacaactgcttaaaaatgacaagattacatcaagtcatgataatgtaatcaaagctgggcttttttatgagttgatttgtaaaaatgaagaacactaa

SEQ ID NO: 92389 - DNA, 1647 bp, Acinetobacter baumannii OIFC047
ttgattacaggggatgataatagtattggcaaatccactcttgctaaactactcctttggactttaggttgctcaacccatcatgatcccacatggaagtctttcgatataagatccttattagtttttaatatcggtaatagtgaatatgcagttggtcggtataatgatattatttttataaaacaaccaagtaaaggttggcaaaaatttgaaaagatcactggtgaatattcaaaattatttgctgaaattgttggctttaaagttttattgccaaacaaaaaagatacaacaaaacttgaaacacctcctccagcatattactttctccctttctacattgatcaagaatcaagctggactcaaacatggagcggctttactaatcttcagcaatatcgtaattggaagcccacggtgattaaatatcacacaggttatataaactctgagtactttaaaattcttgaagaaatttctaaaaaccaatttgaaaaaaaatctgttgaagaaaaagttaggactattgaaacaagcattaatattattactgaatacctaccaactagccctaaagttattgcattaacatctagccagctagaagatctatatcaaacagtaaatgaagaccttaatgcattacagcaacaacaagaagattttttcaaaaaaataagtgaattaaatgctgataaaatctatttccaaaatcaactagatttagctttaattgcttctcaagaacttgaaaaagattaccaattttctattgaaaatatagagttcgagaatatttcttgtccaatttgcggtacaaaacacgataactcattagttaatagggcatctattctagccgataaagttgaagctgaacgtcaaatcgaaactattaaaaataaactgggcgtacttaataaaaatttattgaaaaataatggaactttaaaagaaattgaaactcaaattcagttaattcatgaaaaatatgatagctcactttctgctaatgaaatttctcaacccaataaaccaaatatcctcgaagaaattgctaccagtacaatacataatagagttcaaaaaacaattgaagatagttatatccaaataaaaaaatacgacagcgaaattcgctcctctaaaaaagagcaaaccaaattattaacaaaagaagaaaaagataaactaaattcaaatttcaaattaagtttaagcagttatattgaaaaacttgatgctacagcggtaaacctttccaatatatcctcatctagtgattatagtaaaatgcatgggaatggtggagcagctgaaagtactcgtggtcttttagcatactactatgctgttttaaaacaaattcataatgcagaaaatgaagttttcgccccaatcataatcgacactccaaatcaacaagaacaggctgacttcaactactccaaaattattaattttattattcagcatacacctaattccgctcagctcttcatctgcgcaatgaatcgagaggaaattaaaacttataaagagcaagcgaatactattttcctgactgaaaacaagttgcttgatactaaaaaatataaggaactaaaagacttattaaatttcgaaagttatgactttgcataa

SEQ ID NO: 92390 - DNA, 1080 bp, Acinetobacter baumannii NIPH 60
atgactgaaaatattcttgctgaaccccaaagagaatcagctggtgccagtacttttggtaaatataattttcaataccattgggctttatgtagagtcattgaaaaacataaaagcaatgaagagtatgctttactaattgaatatcatgaagatgttataatcgcaaatagcttaaatggacaagaagccttatttgagttttaccaagttaaaaatcaatcagcctcatttactgaaaactccctaacaaaaagagagaaaggaaaaaaagatacttttaaaagctctgtcttaggaaaattgctaagctcttgtattggcacacaatatgaaaaaagaatcactcaaattggcttagtatcatctagcggattctcattaaaaacagaaaagaatctacaactagacataattaaggtaggtgaccttagcgaagactgccttaagaacttaacagatcaaattaataatgaattaggcattagcttattaccatctcatttacaattcattgtccctgaaattcaattggcaaaccaagaagattatgtattggctcaatttgccaaacttgtaaatacaatattctcaggagcccaatgcaatgctgtagatatttatagagcaataatcgatgagatgggacgtaaaggtcgtattcagctcgattataaagagtgggatagattgattagtaagaaatcgttaacatcagatgaggttaatgacgttctagcattaaatacaactagacctacaattacacaacttgaaaatgactttaatgatcttgtttcgaattttggatggcgtccactttcaaccagaaatttacgaagtaaattaaaaactctcgcattaaagcgctcgggatttccaacctcgtttgatatcaatataattagaactgttaagtcattgattcaaaaagttgattataattctttttcttccgacttagactatgttaatgcgctatttcatcaagctaaagttgataatctcgatagcataattgccgattcagatgatcttaaagttgaaattttttacgtattattagtggatgatttatga

SEQ ID NO: 92391 - DNA, 1725 bp, Acinetobacter baumannii NIPH 60
atgagaagctttcaatttcaacgtcttgtacttatatccgactcgaaaaagttggcgaatcaattcgaatttccgaagaggttaaatctcgttacaggaggcgataatagcattggtaagtccactcttgtaaaaaatttattttgggctttaggatgtgatcctgattttgatgaagagtggaaaaccaatgatataaaagctattatatatttcactgtaaataatatttcatatgttgcaagcagatatcatgattcaatcatatttggtcaagtaggatctatattaagaaaatatcctaaaattactggtgaatattcacaaattttttcagacattgttaattttgaattaaagttagcaaatcgttctgataacctagagtgtcccccaccagcttacttttttttgcctttttatattgatcaaaaaagaagttggaatcagccttggaattcatttgataaattgacgcaattttcagggtttacacgtcccctaattagttacttctgcggttatacaaaatctgagcatttcgagatgcaagaagaattttttgtacaaaaatccatcatgaaagaagcagatgaacaaattgcacgtattagttctgctatagaagtaattgaagatatctctaatgataaaatcaatattgctctttcagaagcagagctaaatcatgttcaaaatgaaatagaagaagagctccaaaattttcttgaaagacaaactcgcctttttgatacacaaacacaaataaattctgaaatttatgatttagaaaaacaacatagaatagctttaaattcagtacgtgaattagaaaaagactatgcatttgctgtcgagtacattccagaagacgttttagaatgcccaatgtgcggaactaaacatgataactctctactcagccgtgcaggaattttgacagataaaagtttacttgaagaagaagctgattttattaaagaatcattaaatcaaaaaagaacagccttaagaaacttacaagaagaactacatgacgtaagatttgaaattaatagaattaatgaaaaatatgttatttcaccacatgaaaatcaaaatcagaatatgcaaagtgccatacattcaattgcattaaaaaatgttagtcaaaatgttgcagacgttattgtttctcatgaatcaagatccaaacgggctgaaaaaattcagaaagaaataaaatcagatcaaaataagctgctaactaaaaaagaaaaatctgatctaagttattattttttcagtaatttagagaaaaatattgcaatattgtccgctactggaattaatctaaatggggtcaaaacacctatggattttaaaaaaattttaggcggaggagctgctgaaggaacccgaggagtattagcatatcaacttgcaattcttaaacaaattgaatttgcaaacaattgtgccatcgcccccttcgttattgatacacctaatcaacatgaacaggcatccgagaattacaaaagaattattagcttgcttcaacataacctttcatcaaacattcaaataattctatgtggaatggatcatgatattttatcagatttcaaaaaagattcacatataattcaactagatagagataaaatactgcaaaaaaaaccgtataataccctatcaaaagagtacactgaacttgtaaataacatcaatattgaagcttag

SEQ ID NO: 92392 - DNA, 1080 bp, Acinetobacter baumannii CI78
atgaaaaatttaaatatattggatgatgaagagcgcgagaataaaggtttagataccttattaagattcgaatatcaaattgattgggcaatttatcatgctttagataagttaagtcaaaagcaagaatttgtagcttttatcgaatttcatgaggatgttttatttgctaatagctgtgcatttaacccatctactagatttgaactttttcaaattaaaacgacatataaatcttatactccggcaagtcttacagtattaaaaggccctaattctactttaggaaaaatgattataggaatcaaagataaaacttttgaaaaacaagtagataaattgtgtttgctttgcttggaagatattaattttagttataaaatccaagatgttgataaagactataaatttagtgaactacatgaaaatgataagaaaattctaaaaaatgctatatcaaatgagctaaattttacaatagattctaactatgaagatatgattatttttcgtaaaacagcattaagtttagatcaatcagatcgtcaaataaaacataaaattcaagattttattgaaaataattatggtgatattggtatgcgtcctgctagtatataccgagttcttgcagatgaccttcgcccaaaatctcaacataaacaacgttacgaattctgggaagactgtgttaaatatagaggtcttagcagtcaaaccattgctgagcatatcataaaaaatatagaccaaaatatagaaattgagcttaaagaattgattgagtcgcaactcaaagaaaagggcgtgaaaacaattaaaattgcccgaatattaaagaaagtgcgtgaatattttttatttaaaatatgtattagttccgctgtagtacaaaatgaattagatcaattactaagtgaaataaatttacctttagacattgatgatgaaaaaacatattgggaatctatagatttacttgataaaaaaataaatgaacatgttttattaaaagaatataataagctacaagctgtagctatatatgaagtttttaaggtgctttatgaccagttttaa

SEQ ID NO: 92393 - DNA, 1692 bp, Acinetobacter baumannii CI78
atgcaaaatacaaagagttatttccaatttcagagaatcgtcatgagatctctcaaagagcgcggagggaaagtacaaaaactttatctcagaactctaattgattctaaagataatacaaaaggaaaaacaactcttatcaatagtcttttttggggcctaggctgtgaagtgaaattcgaagaaacttggtgtgatgacctagaaactcttatttcattttcagtggcagataaaaattatgaaatttatagaaataatgaattcatttctattgtttctgaagatgaggataagtcttataagtatccaattaagtcaaaaaaggttgatagcgattttattgaaaagttgaatgaaattctaaactttaatgttttattaaaatatgcaaaggcgaaaaaactgtctcgagtaccaccaagttactattttgcgactacttatattgagcaaatgactggctgggctaatttctggttgtgtttccagaatatgaatgcttttgataaaaataatagaactgaattaattaaatatatatgtggtgtacttgataaaaaatactatgaaaaaaagtatagtgaaaatataattacacaagaaaaaaaagaaatagagaaaacacttgagaaagaaaattgtaattttacttatttaaaaggttttgaaactgataattatttaaataatgtattcagaaagtcacttactctggaaaattatgaaaaaaatctactcacattaagaaacgaatatttagacaaagcttcaaatttatcatctctaacaaatgaaatagagttaattaatattgcaataggagagttagaacaagattacgaatatagtgttcgtaatgttgatccttttgaagttacctgcccaacttgtggagttattcatgagaatgatattgttaataagttctcaattttaaaagactcagatcttttattgaaaagaattgagcgactaattggagaaaagaataaaactagacaagagcttaataaattatccaaacttatccaatttgaagaagaaaatataaatgagcttatggatcaaaatgatgtacaagaatacttaaactattcagtcatacaaaaaaaaatgattcctgccattcaacgtaggatcaatcataatgaaatacttattgaggagaaaaagaatctaattacagagtctaagagtgaaagatcattaattgaaaaagaaaatcaaaaagatctagaagacgaatttgtagattattttgaaagattatgtagagaacttgagataacacgcgggaaaaagaaaaattttacagaaattcttaaccacaccagtgggggagctaatggcattaagcatatgttggccgttcgtttaacattattacatgcgatgtgtacttatgccgagtcttctataccaccttttgttatagattctcctcgtcagcaagacattaatgattataattatggcctcgttttgaaagcctttgataaaattccagaaaatgttcaatttattgtggcagcagtaaaatcccaacctattagtgaaattcgggataaatttgaggaaatttttattgggaaaaaattattatcagaagatgaatttgatatttctagtttattaattaacaaacatgaaaataaaataatttttatagattcagacattaaacagtaa

SEQ ID NO: 92394 - DNA, 1182 bp, Acinetobacter baumannii CI78
ttgggtatacagagatgttttattaatagaactatgagtgataataaagagtttatagacaagcttcttgatagtgaagaagatgaaaaacagggaacacatgcaaaacggggttttagataccaagattggtggtgcacttataaaacatttgaaacatgggcatcactaaataccaattttgcagtaggcgttgaaataaaagaagattttacaattattgattgtttagaaagcccaacaaaaattgaattttttcaaattaaaaaaaatgaaagacctaaattatggagcataaatgatttaataaaatctcctcaaagaaaaaataaaaaagaagattcgattttgtcaaaactatattctagatggttaaagtttatgcctctggatacaaaaatgtatttcattacaaatcaaaaattaaaaggaaaagatgtcaagaataatgatattgagcattttgactcaaatcttggatgtgatctccacccaagtgaagtaaatagaataactaatgccctacagcgacaactcaatttatcatctaatgagcctgttgaactgaatagaatacaattctgtatatctaatatggatgttaatgaaccagatacccatgttataggaaaaatatattcattaaatgaagaagctaagttcccaatatatcttagaaacattggtgtagcagctaaatatctaacaaaccatttttatcaattaagtagtaatactaattttgctattaatattgatcaattaaaagaaagatgtataacaagaaagggatttgaagatattattcataagattgaagacacacataaaactcctgaagattatatgaatgaaggaataagtacgttaagtgaggagggctatccgtatcgttcgcgtaaacaaattattaaagcatctaccgaagttcttttagacttaagaaacaggaatcaacagcatagccagaatcttttttttgaaatagataaatttttctcagaacaagaaactatgattaataagtttgatacattaagcaatcttattaattttgtttcagaaaggctttttgctgatagaaaatataatttccttacattagagtatataaaatgttcagtattaatttttgaagtttctgatggagatatttattgtgaacaatacttcaacttataa

SEQ ID NO: 92395 - DNA, 1644 bp, Acinetobacter baumannii CI78
ttgaaatcgaaaataatttacaaggagattttaatactttcaaaaaaagaaaaaaaatcaaaaaaagtagttctagaacctaaaaataatattatttttgggaaaaatcatcgaggaaaatctactgttgtaaagtctattttttgggctctaggtcttagtcctactcatttctttactaatgggaaatttgataaagatattacttgcttattaactatttcatacgatgaaaatatttattatttcttccgaaatggagataatagaaaactttatagcgatgataaaaatataattttcgaaaccgacgaaaacaataaatggcaagaaagcatggctgaatttttcaactatcctttatcttcaattcattttagtaatctacaagaatattatttaggattacaaggtatccttactccatactatatcaaccaagattcaagctggactagtaaatggagtgggccatttaacggtctaacgagatatctagatttttatcaacaagttattgagcactttacaggaattgtatcaaatgaaactgtaattaaaaaacaaaatcaaaaaaagcttaataccagaaagaaagaattagaagttgagcttaagatttataagaaatccgaagaacaactaatcattactgattataaaaatacaccattaccagatattaatagtagcttttttaaagagaaattagaaaaaacatcaaaaattttaaagagttgcaaaataaatcaagagaaactaaagaatgaaatgatagaaataatttcagaaaaaaataaattacacaatctattaaaaaatgcctataacacacatcacgaattagtaggtgataaaaattttttaaataaaattgaggataacacctatttagagtgccccacctgtggaacaaattacttaaaaagtttaaaaacagatattgcacttgaatttgacatacaaggaatagaagaaaatatatatagtttaagagagcaaatagagaatttaaataaaaccgaaaaagatttaagtgctaagttaaacctcataaataatgaaatagagaatttaactttagaaactcaaataaacaatgacctaaactactcctttgaaactgttataaaaactttttcaaatagggatattaaacagaatctcaactccaatatgcaatctctttatgagcaaatttttgctatcgatgatgaaattgaaactatccaattacagattaatgagttagagagtgaagaagaaattaaagctaaaaaagataaatttaaacattatcttaagtttttttataaaaaacttgatgtcgatactgatatcctcccgaagcaagtatatttcaaacctaatttaacaggaagttcaagttcaagaagtattttagcagctcacttagcttatataactttaagttatgagcttactgactttcctttattccctattgttatcgacactattcaacagaatggtcaagatatgccgaatattgataatatggtacaaactattgctaaatttaagcaacatcaaattattttaggtatggagactcttccaaataatcatcaagaacattcatttaagattactaaattaataaataaaagggctctcttctga

SEQ ID NO: 92396 - DNA, 1080 bp, Acinetobacter baumannii 1043794
atgaaaaatttaaatatattagatgatgaagagcgcgagaataaaggcttagataccttattaagattcgaatatcaaattgattgggcaatttatcatgctttagataagttaagtcaaaagaaagagtttgtagcttttatcgaatttcatgaggatgttttatttgctaatagttgtgcatttaacccgtctactagatttgaactttttcaaattaaaacgacatataaatcttacactccaacaagcctgacagcattaaaaggccctaattctactttaggaaaaatgattgtaggagtcaagggtaaaacatttgaaaaacaaatagataagttgtgtttgctttgcttggaagatattaattttagtaataaaatagaagaggtagatagagattataaatttagtgaactacatgaaaatgataagaaaattctaaaaaatgctatattaaatgagttaaattttacaatagattctaaatatgaagatatgattaccttccgtaaaacagcattaaatttagatcaatcagatcgtcagataaaacataaaattcaagattttattgaaaatacttatggtgatattggtatgcgtcctgctaatatataccgagttcttgcagatgatcttcgaccaaaatctcagcataaaaaacgttacgaattctgggaagattgtgttaaatatagaggtcttgctagtcaaaccatttctgagcatattgtaaaaaatacagatcaaaatatagaaattgagcttaaagagttgattgagtcacaactcacagaaaagggtgaaaaaacaattaaaattgccagaatattaaagaaagtgcgtgaatattttttatttaaaatatgtattaattctgctgtggtacaaaatgaattagatcaatttctaagtgaaataagtttacctttagatattgatgatgaaaaaacatattggaaatctatagaattacttgataaaaaaataaatgaacatgttttattaaaagaatataataaactacaagctgtagctatatatgaagtttttaaggtgctttatgaccagttttaa

SEQ ID NO: 92397 - DNA, 1692 bp, Acinetobacter baumannii 1043794
atgcaaaatacaaagagttatttccaatttcagagaatcgtcatgagatctctcaaagagcgcggagggaaagtacaaaaactttatctcagaactctaattgattctaaagacaatacaaaaggaaaaacgactcttatcaatagtcttttttgggggctaggctgtgaagtgaaattcgaagaaacttggtgtgatgacctagaaactcttatttcattctcagtggcagataaaaattatgaaatttatagaaataatgaattcatttctattgtttctgaagatgaggataagtcttataagtatccaattaagtcaaaaaaggttgatagtgattttattgaaaagttgaatgaaattctaaactttaatgttttattaaaatatgcaaaggcgaaaaaactctctcgagtaccaccaagttactattttgcgactacatatattgagcaaatgactggctgggctaatttttggttgtgtttccagaatatgaatgcttttgataaaaacaatagaactgaattaattaaatatatatgtggcgtacttgataaaaaatactatgaaaaaaagtatagtgaaaatataattacacaagaaaaaaaagaaatagagaaaacacttgagagagaaaattgtaattttacttatttaaaaggttttgaaactgaaaaatatttaaataatgtatttagaaagtcacttactctagaaaactatgaaaaaaatcttctcacattaaggaatgaatatttagacaaagcttcaaatttatcatctctaacaaatgaaatagagttaattaatattgcaataggagagttagaacaagattacgaatatagcgttcgtaatgttgatccttttgaagttacttgcccaacttgtggagttgttcatgagaatgatattgttaataagttctcaattttaaaagactcagatcttttattgaaaagaattgagcgactaaatggagaaaagaataaaactagacaagagcttaataaattatccaaacttatccaatttgaagaagaaaatataaatgagcttatggatcaaaatgatgtacaagaatacttaaactattcagtcgtgcaaaaaaaaatgattcctgccattcaacataggatcaatcataatcaaatacttattgaggagaaaaagaatctaattacagagtttaagaatgaaaggttattaattgaaaaagaaaatcaaaaagatctagaagatgaatttgtagattattttgaaagattatgtagagaacttgaaataacacgcgggaaaaagaaaaattttacagaaattcttaatcataccagtgggggagctaatggtattaagcatatgttggctgttcgtttaacattattacatgcgatgtgtacttatgccgagtcttctataccaccttttgttatagattctcctcgtcagcaagacattaatgattataattatggcctcgttttgaaagcttttgataaaattccagaaaatgtacaatttattgtggcagcagtaaaatcccaacccattagtgaaattcgggataaatttgaggaaatttttattgggaaaaaattattagcagaagatgagtttgatatttctagtttattaattaataaacatgaaaataaaataattttaatagattcagacattaaacagtaa

SEQ ID NO: 92398 - DNA, 1086 bp, Acinetobacter baumannii 1289694
atggctaataaaaatatattaaatgaaaaagaaagagaaaataacggactagatactcaattaagattccattatcaagctgattgggcaatagtctatttattagaaaaattattgaaagaagaagagttcgtaatttttgttgagtatcatgaggatgttatttgctccaactccactcatctacacgatgatgtcgaatttgagttttatcaaatcaaaactactgaagctaattttacaatagataatctctgcaagtatgaagttggtggcaactctataattggaaaaatgattttaggcgttgaaaataaattatttaaaaaaaatgttaaaaaattatgtcttttaactattagtgatattaatttcaaaacgaaaattaaaattttaggggatcaatgccattttactaatttagaagaaaatgaaattaaagatattttagataggttaacaaatgaactaaagattgttgatcccatatatcaaaatattttatgctttcagaagtctgagttaccttttccttcgtcacaattaagtgctaaaggaaagattgctgaatttattcaatcgaagcatggcgatgttcgatcggatatatcgagtatttatcgagtactgtgggatgatttaaaaattaaatatgaatataaaatcccttttgaccaatggaatgaatgtgttcaaaaaagaggtttgaacagcgaagaagtaaaaaaaatactcgcgacacatatatcgcttgatctatctgaaaatttaaaaaaatttattgaaaattatataaataaactttcaggagatgatttacttacccctataagaattaatttaattaataattattatacatatctcttagtaaatagatcaccagaaattattaaatatttagaagaaatgagaagtaaaatttccattccttctaatattttagacttaaatgaaatacagcgcgaaatcactaaaatcgatttaataattaatgataatttgcaatttaaggaatttaatcggatgcaatctgtagctatttatgaggtcttaaataaagtatatgaacaattcacaaaatag

SEQ ID NO: 92399 - DNA, 1656 bp, Acinetobacter baumannii 1289694
atgaaaaataccagcaactcttttcaatttcagaaaataattattgtatctcgaacagaaaagtcaggtcgagttttaaagatatttccaaggacattgataacgacaaaaggtaatacaattggtaaatctacattattgaattgtttattctgggctctaggttgtgaagttcgtttcgaagaagattggcccgagcttgacacagttgttttaattgagttttcaattaataataaaatttataaagtcaaaagagattctcaagctattcatctacaggaagatgatgaacaatgggcaacctatgaaaaaataactggttcttatttagatagattaaattctattttaaatttcaatgttttattaaaaaattctaaagcaaaaaaactttctaaagtccctccagctttctattttgcatctacttatattgaacaaatgagtgggtggaatgaaatttggaattcatttaacaaccttggacaatttgataaaaataacaagtttgaactctccaaatatttatgtggagtattaaataaaaattactacgataacaaacttaatcaaaacttttatgaattaaaaaattttgatatctctaaagaaatcctaaaaaccaatgaagtatcagactactttagatctaaaagagctattagcccccaaatagatcttcaagataaaattaaaaactctgccagatcagtagtaatggctgaaagaaaaattttagaaaagaaaaacgagtatataaacatatcttccagaatggcagctatagataatgaattacaaattattcaagttgctattggagagattgagcaagactataactattctattgaaaatattgagactacttcaattttttgtccgacttgtggtgttgaacataaaaatgatttagtcaatagattctccttgattcatgatcaaaatagattaatggagcaaataaaaaatttacaaaatgaaaagtcagttttaattaacaaaagttataatttgactaattctatagatagcttttatcaagaaattgaaggtgctttcaaagaggaaagtttcaatgaagatattaatcagttatttattagcaaatctcttattcctggcttagaagaaaaagttgcctcagataacagagaatttagagcaaatacgaaagagataagaaaaataagaaatgaaaataaaattattgagaattcaaatttagaagaaattgaaaaagatgttgttgaatatttcaattcattatgtactgacttaaatattaaaatgtatttaaaacataatttatacgatatactcaactactatagtggtggtgctaatcaagttaaagcaatgttagcgaaaaggcttactatccttaattctatctactctcatgctgagttatctactcctccatttattattgactctccacgacagcaagatattgattctgataattatcataatatgcttaatattttaattagtaatacacctgacgatgtacagttaattattgcggcagtgcaaaataactttattgacagcattaaaggaaattttgaagaaattaacctcgaatcaacacttttaactgcagaagagtatgaacttgccaatttcttaatctcacatagttaa

SEQ ID NO: 92400 - DNA, 1098 bp, Acinetobacter baumannii 1295743
ttgtcagaaattgaaaaaataaaaacccctaaccctttagctgttgcacaaagagaaacagcaggtgctagcacatatggaaaatacgaatatcaatatcattgggcattgggtcgagtgttagatgaacactcaacttcaagtgactatgtggtatttgttgagttgcatgaagatgtcgtttattgctcatcaattgatgaaactaaagcgttatttgaatttaatcaggttaaaaataaatccactacaaaatttacaagtaaaagtctaactaaatgttcaaaaaaagaacctaattcagtattaggaaaaatgttagtcggtattaaagataaaccttatcgtgacaaactgattagtttaaatttggtagcaacttgtgggttttcacttcaacttaatggtgagccattaaatctagaagtcatcaaagttggagatttacatgagaactgtattaatgatattcaaactgctattgatttagaaataggtgataaaagcttacccgatacactctccttcattactcctacactaccagcaaacggattccaacagtatactattggaaaaatctcaagcttagttaacagaattaaagcaggagcaaatcataatccagaatctatataccgcttattaatggatgaattgcgtattaaaggtgcggtaacttatgactataaattatgggatgatctaattcagaaaaaaggattaactggtattactgtcgaaaatacaattgctcaattcactaacagtaatgatttaaaaacacgagaaaatgagcttactgaaatacttaatgaactaaatttaaaacataatgaaaaggcaaaaatcagaaaagaatttcatcgttaccatgcgtcatctttgcaacggaatcttgccgtactacaagtacatgagataataagaaatatcgtaaacataaattatccaatttatgaggatgagggacttgaagttttcattgaagaatcaatgagtcaattgcttaaaaatgataagattacatcaattcatattgatgcaattaaagctggcattttttacgagttgattggtaaaaatgaagaatactaa

SEQ ID NO: 92401 - DNA, 1746 bp, Acinetobacter baumannii 1295743
ttgggcaacataacaaacttatcgttcaaacaactgacagtagtgtcaaattcccaaaagtccgcaaatcagttcaacttccacccgaaatacaacctgataacagggaatgataatagtattggtaaatctactctagctaaactacttttatggactctaggctgttcgactcatcatgaccctacatggaaagctttagatataagagcgttattagtttttaatatcggtgacaatgaatatactgttggccgttataatgatattatttggataaaacaaccaaatgaaaattggcaaaagtttgaaaaaattacagggaattattcaaaaatatttgctgagattgttaaatttaaagttttattaccgaataaaacagattctacaaaattagaaactccaccacctgcatattattttttacctttttatattgatcaagagtgtagttggactcaaacatggaatagtttctccaatcttcaacaatattctaactggaaacctgctgtaattaaatatcatactggatatattaacgatcaatacttcgaaattcttgaaaaaatttctaaaagtaaatttgataaaaaaactgttgaagaaaaagttaaaactattgaaactagccttaatattattaatgaatatttgccttctaattctaatattattgcactaaattcaaatcaattagaagttttatatgaaaatgtaaattcagatctgaaaaatttgcaaaaaaaacaagaagatttttttagaacaatttctgaattaaatgcagataaaatttatttccagagtcaattggatttagctttaattgcttccaaagaattagataaagattatcaattttctgttgaaaatatccaagatgaaaatatatcctgtccgatttgtggcactaaacatgctaacacactgattaatagagcatctattctagcagacaaagctgaagctgatattcaaattaaaactattaaaaataagatttctttgataaataaaactttagataaaaataatgaaaaattagctgaaattgaaagtgaaattaattctattaattcaaaatataataattcactatctataaatgaaaattttaagcaaaataatacaagtattattgaagaaattgctacaagtacaattcacaataaagttcaacaaactattgaacagagtgctattcaaataaaaaggtatggtgctgagatccgctcctaccaaaaggaacaaaataaattattgacaagtgaagagaaagataaattaaactcgaacttcaaattaactttaagtaattatattgagaaacttgacgcaacagcagttaatctttctaatatttcctcttctcttgattataataaaatgcatggaaacggtggcgcggcagaaagtacccgcggccttttagcttattattatgctgttttaaaacaaatttatactgccgaaaatgaaatatttgccccaatcattattgatactcctaatcaacaagaacaggctgattttaactattcaaaaattattaatttcattgaacaaaatacaccagattcagctcaacttatcatctgtgcaatgaatcgagatgaaattaagacttataaagatcaagcacatactattttcttaactgaacataagttacttgatcctcaaaagtacaatgaattgaaaaacttattgaatttcgaaaattatatttttaataattag

SEQ ID NO: 92402 - DNA, 1086 bp, Acinetobacter baumannii 1475718; identical to SEQ ID NO: 92398

SEQ ID NO: 92403 - DNA, 1656 bp, Acinetobacter baumannii 1475718; identical to SEQ ID NO: 92399

SEQ ID NO: 92404 - DNA, 1086 bp, Acinetobacter baumannii 1475718; identical to SEQ ID NO: 92398

SEQ ID NO: 92405 - DNA, 220 bp, Acinetobacter baumannii 1475718
atgaaaaataccagcaactcttttcaatttcagaaaataattattgtatctcgaacagaaaagtcaggtcgagttttaaagatatttccaaggacattgataacgacaaaaggtaatacaattggtaaatctacattattgaattgtttattctgggctctaggttgtgaagttcgtttcgaagaagattggcccgagcttgacacagttgttttaattg

SEQ ID NO: 92406 - DNA, 1080 bp, Acinetobacter baumannii 972082; identical to SEQ ID NO: 92396

SEQ ID NO: 92407 - DNA, 1692 bp, Acinetobacter baumannii 972082; identical to SEQ ID NO: 92397

SEQ ID NO: 92408 - DNA, 1080 bp, Acinetobacter baumannii 232184; identical to SEQ ID NO: 92396

SEQ ID NO: 92409 - DNA, 1692 bp, Acinetobacter baumannii 232184; identical to SEQ ID NO: 92397

SEQ ID NO: 92410 - DNA, 1080 bp, Acinetobacter baumannii 268680; identical to SEQ ID NO: 92396

SEQ ID NO: 92411 - DNA, 1692 bp, Acinetobacter baumannii 268680; identical to SEQ ID NO: 92397

SEQ ID NO: 92412 - DNA, 1080 bp, Acinetobacter baumannii 655378; identical to SEQ ID NO: 92396

SEQ ID NO: 92413 - DNA, 1692 bp, Acinetobacter baumannii 655378; identical to SEQ ID NO: 92397

SEQ ID NO: 92414 - DNA, 1086 bp, Acinetobacter baumannii 263903-2
atggctaataaaaatatattaaatgaaaaagaaagagaaaataacggactagatactcaattaagattccattatcaagctgattgggcaatagtctatttattagaaaaattattgaaagaagaagagttcgtaatttttgttgagtatcatgaggatgttatttgctccaactccactcatctacacgatgatgtcgaatttgagttttatcaaatcaaaactactgaagctaattttacaatagataatctctgcaagtatgaagttggtggcaactctataattggaaaaatgattttaggcgttgaaaataaattatttaaaaaaaatgttaaaaaattatgtcttttaactattagtgatattaatttcaaaacgaaaattaaaattttaggggatcaatgccattttactaatttagaagaaaatgaaattaaagatattttagataggttaacaaatgaactaaagattgttgatcccatatatcaaaatattttatgctttcagaagtctgagttaccttttccttcgtcacaattaagtgctaaaggaaagattgctgaatttattcaatcgaagcatggcgatgttcgatcggatatatcgagtatttatcgagtactgtgggatgatttaaaaattaaatatgaatataaaatcccttttgaccaatggaatgaatgtgttcaaaaaagaggtttgaacagcgaagaagtaaaaaaaatactcgcgacacatatatcgcttgatctatctgaaaatttaaaaaaatttattgaaaattatataaataaactttcaggagatgatttacttacccctataagaattaatttaattaataattattatacatatctcttagtaaatagatcaccagaaattattaaatttttagaagaaatgagaagtaaaatttccattccttctaatattttagacttaaatgaaatacagcgcgaaatcactaaaatcgatttaataattaatgataatttgcaatttaaggaatttaatcggatgcaatctgtagctatttatgaggtcttaaataaagtatatgaacaattcacaaaatag

SEQ ID NO: 92415 - DNA, 1656 bp, Acinetobacter baumannii 263903-2; identical to SEQ ID NO: 92399

SEQ ID NO: 92416 - DNA, 1086 bp, Acinetobacter baumannii 723929; identical to SEQ ID NO: 92398

SEQ ID NO: 92417 - DNA, 1656 bp, Acinetobacter baumannii 723929; identical to SEQ ID NO: 92399

SEQ ID NO: 92418 - DNA, 1077 bp, Acinetobacter baumannii 1064293_45
aaaaatttaaatatattagatgatgaagagcgcgagaataaaggcttagataccttattaagattcgaatatcaaattgattgggcaatttatcatgctttagataagttaagtcaaaagaaagagtttgtagcttttatcgaatttcatgaggatgttttatttgctaatagttgtgcatttaacccgtctactagatttgaactttttcaaattaaaacgacatataaatcttacactccaacaagcctgacagcattaaaaggccctaattctactttaggaaaaatgattgtaggagtcaagggtaaaacatttgaaaaacaaatagataagttgtgtttgctttgcttggaagatattaattttagtaataaaatagaagaggtagatagagattataaatttagtgaactacatgaaaatgataagaaaattctaaaaaatgctatattaaatgagttaaattttacaatagattctaaatatgaagatatgattaccttccgtaaaacagcattaaatttagatcaatcagatcgtcagataaaacataaaattcaagattttattgaaaatacttatggtgatattggtatgcgtcctgctaatatataccgagttcttgcagatgatcttcgaccaaaatctcagcataaaaaacgttacgaattctgggaagattgtgttaaatatagaggtcttgctagtcaaaccatttctgagcatattgtaaaaaatacagatcaaaatatagaaattgagcttaaagagttgattgagtcacaactcacagaaaagggtgaaaaaacaattaaaattgccagaatattaaagaaagtgcgtgaatattttttatttaaaatatgtattaattctgctgtggtacaaaatgaattagatcaatttctaagtgaaataagtttacctttagatattgatgatgaaaaaacatattggaaatctatagaattacttgataaaaaaataaatgaacatgttttattaaaagaatataataaactacaagctgtagctatatatgaagtttttaaggtgctttatgaccagttttaa

SEQ ID NO: 92419 - DNA, 1692 bp, Acinetobacter baumannii 1064293_45; identical to SEQ ID NO: 92397

SEQ ID NO: 92420 - DNA, 1086 bp, Acinetobacter baumannii 225588; identical to SEQ ID NO: 92398

SEQ ID NO: 92421 - DNA, 1656 bp, Acinetobacter baumannii 225588; identical to SEQ ID NO: 92399

SEQ ID NO: 92422 - DNA, 1086 bp, Acinetobacter baumannii 1451147; identical to SEQ ID NO: 92398

SEQ ID NO: 92423 - DNA, 1656 bp, Acinetobacter baumannii 1451147; identical to SEQ ID NO: 92399

SEQ ID NO: 92424 - DNA, 639 bp, Acinetobacter baumannii 72431
gtgcaacaaagcccaaatgaactaaagattgttgatcccatatatcaaaatattttatgctttcagaagtctgagttaccttttccttcgtcacaattaagtgctaaaggaaagattgctgaatttattcaatcgaagcatggcgatgttcgatcggatatatcgagtatttatcgagtactgtgggatgatttaaaaattaaatatgaatataaaatcccttttgaccaatggaatgaatgtgttcaaaaaagaggtttgaacagcgaagaagtaaaaaaaatactcgcgacacatatatcgcttgatctatctgaaaatttaaaaaaatttattgaaaattatataaataaactttcaggagatgatttacttacccctataagaattaatttaattaataattattatacatatctcttagtaaatagatcaccagaaattattaaatatttagaagaaatgagaagtaaaatttccattccttctaatattttagacttaaatgaaatacagcgcgaaatcactaaaatcgatttaataattaatgataatttgcaatttaaggaatttaatcggatgcaatctgtagctatttatgaggtcttaaataaagtatatgaacaattcacaaaatag

SEQ ID NO: 92425 - DNA, 1656 bp, Acinetobacter baumannii 72431; identical to SEQ ID NO: 92399

SEQ ID NO: 92426 - DNA, 1104 bp, Acinetobacter baumannii
atgctagatggtaatcattccccccaaaaccctttagcagtacctcaaagagaaacagctggtgccaatacatttgctaaatatgaatatcaatatcattgggcactttgtcgaattttagatcagcatacaaaatctcaagactatgctgtgtttattgagctacatgaagacgttgtattctctacatcaacggagttgtctaaagctgaatttgagttcaaccaaattaaaaatttaactagtaaaccattaaaagcaaaaaatttaatacagcgaaaaaaagataaaggaaaattaaaaaattcaatactcgggaaaatggtaataggcgtcaaagataagccttttttcgatcaactcaaaagtttaaatctagttgcaacatgcggatttgatataaacttaaagaatgcagatttaaaacttgaagtgatttctttggatgacttacatgaagattgtgtaatagaacttcaaaatgccgttgacattgaagttgggaaatggcctctaccttctatcctaaatttaattacccctggacttcctgataaatgctttcaagatgtatccatcggtaagatatctagtgtagttaacattaaaaaatctggagcgaatcataatccacaacttatatatcaagtcttaattgatgaattacatcgtaaagggacagtcgaactagattttacaaaatgggaagacttgatttccaataaaggattgactggtataaaagtagaaaaaactatatctcagttcacagaaaataattctttaaagcaaagagaaactgagctatcagacatcctaagtgaattaggcattttgcaccatgagaaaacaaaaattaagaaagcattcaaccgttaccacacaagcaccttacaaagaaatcttgcaatacttcaggatcaaggaatcctgaaggaagtgataaataataactattcaacctacgaaaatgaaggtttagaattttttttaaaaatttcgatggatcaattacttaaaaatgataaaattacattaaaagatgtgtgtgatcttaatgctggacttttatatgagttgatttgtaaaaatgaagaattctga

SEQ ID NO: 92427 - DNA, 1740 bp, Acinetobacter baumannii
ttgggcaacataataaacttatcgttcaaacaattgacaatagtgtcaaattcccaaaaatccgcaaatcagttcaactttcacccaaaatacaatctgattacagggagtaataatagtattggaaaatcaactcttgccaaattactattatggtcaatgggttgctctcctaatttagataaaacatggaaaaatttagatattaaaagtttactaatttttaatattggcgacaaagagtattcagtttcaagatacggcaatcagattttttttaaacagcccagccaagcctggcaagtttttgaaaaaatttcaggtttatattctgagttatttgcccaaatcatgaaatttcatgtgctattacctaataagacccaaactactaaattagaaactccgcctccatcctattattttcttcctttttatattgaccaaaaaataagctggactagtacttggagtgggtttgccaatttaagtcagtactcgaactggcgtgatactgttattaaataccacactggatatattgactctcagtattttgaactacaagaaaaaatttatgagaaactaactgaaaagaaaagtgcagaagagaaagtaaagtctcttgaaaccagtatcagcgttataagtacctatatacctactaattcaagaattacagctttaacacctgaggatttaaataaattatatcagctagttacagaggatcttaaagacctccaaaataaacaagaaaattttttttcattaatatctgagcaaaatgcttcaaaagtttattaccaaagtcagttagatctagcaaagctagcggcacatgaacttgaaaaagattatagattttcggtagaaaatataaataacgatagtattttttgtccgatctgtggaacagaacatgacaactctattgtaagtagagcttcaattcttgctgataaagcagaagctgatgagcaaataaaaagtatccaaaaaaaattggattacattaatcaccaaataattaagaactctaaattactagaagatgttgaacaccaaatcaatctaataaatcaaaaatatgattcatctcttacaaactctaatatgtcggaaaatatttctcccaatattttggaagaaattgcgacaagtacaattcagatcaaggtccataagactattaaccaagaaaatataacaattaaaactttagaaaaagatattaaaattaataagaaagaacaaaaaaaactttcgacaattgaaattaaagaatcgttggatgctgccttcaaattaagtttaagtagttatattaaacaattggatgcaactactgtaaatcttgcagatatatcttccgcattaaatgcaaatagaatgcatgataatggaggagccgcagaaagtacccgtgggctattagcttattattatgcagttttgaaacaaatttataatgcaaataatgaggtttttgcaccgattattattgatacgcctaatcaacaagaacaggctaatttcaattactctaaaattctcgactttatcattcggcacactcctagcacatcacaactgatcatatgtgcaatggatcgaagtgaaatacaggaatataaggatcaagctaatactatttttctgactgagaataaattacttgatacaaagaaatataaagaattaaagaccttatttactttcgaaactttctcaacttaa

SEQ ID NO: 92428 - DNA, 1080 bp, Acinetobacter baumannii; identical to SEQ ID NO: 92396

SEQ ID NO: 92429 - DNA, 1692 bp, Acinetobacter baumannii; identical to SEQ ID NO: 92397

SEQ ID NO: 92430 - DNA, 1086 bp, Citrobacter freundii
atggaacgtaatgttttgggtcatgctcaaagagaaatttcaggagcaaccacatttggaaaatatgattttcaatatcattgggctctatgcagaataatggaaaagcataaatcaaattctgactacgcattattgatcgaatatcatgaggatgtcgttatcgcagactcattgtatggaagttcggcaaaatttgaattttttcaagtaaagaacactggaaaacctttcacttctgacgccttaaccaaacgagagcaaggtgctgagggagctaagagttccattctcggtaagctattaagctcatgtattggtacagaccatgaagcacgaattacggaaataggtcttgtgtcctccagtggtttctcatttgaacaaagagataagaagttaaaattagacgttataacttcaggtgatcttagtgtagattgcttgtcggggttaactggaaaattaaaggatgagcttggaatatctctcttgccagaaaatctaaagtttattgttccaaaaataaaattagagaaccaagaagagtttgtcattggcagatttgctgaattagtaaatgaaatatttccaaatagtcattgcaatgccgttaatatttatagagcaataatcgatgaaattcatcgaaaaggacagaatagttacgattttactgtttgggagaaaatggttgaggataaatctctaacatctcataaggtaaaggatgttatagctgttaatacaacaagcccaaaatttgaagactttgagaaagactttgagtacttagctaaaaatgacatgaaatggaacaccttaacttatcggaagattaataaaaaaataaaacaacttttcttgcgccgaaccggacattcgtcggcttttgatatgaatataatgagaatagtccagcaggcgctaagtagtgtctctgaagaagactttacagaaacccgtgattacattgagtcagttattgtaaaagctcaagagcttaatattgaagatcaagtaccagaatatgacgacatattatgcgaggtaatttatagctttttaaaggtgatgcatgaataa

SEQ ID NO: 92431 - DNA, 1734 bp, Citrobacter freundii
atgagaaacttgacatttcaacgattagttctgatatcagattcgaaaagacttgcgaatcagttctcgttccagaaaagattgaatttaattaccggaaaagataatagtattggcaagtccactctagcaaaaagtttactgtggtctttaggatgcgatcctgttttcgatgaagaatggaaatcaaatgacatcaaatctattttatactttactataaataacaaagagtatttttcatgtcgtggaacccactcaataattttgggagctatcggcgatgaagctcaaagatatataaatataactggtgatttttcgaaagatttctcggatctcgtaaatttcaaaatgaagcttcctaatcgtggtgatggaaacttagagacacctcctccagcatattattttttaccattctatattgaccagattaaaagctggagttcaccttggaattcattcgagaacttagggcaatattccaactggaaagctccattaatcaaatattttactggttatcttaagcctgagcattttgatattgaggaaaatatttatgaatatagtgaaatcaaaaaagaatcagcacataaaatagaaaaatttcaaagcgcggttgaagttatagttgataactcggttgattcgcatatagcgttagataatgatgactttattaagattcagaatgaaataaaaaatgaactttacgacttgatcgattaccaaacaagactttatgatgctcaggctactatcacctcaaatatttacgatctcgaaagtcagtatacgttagccattacttctgcaaatgaactcgaggaagattataagtttgcggtagaatccatacctactgacaatttagagtgtccattgtgtggcactcttcacgataactcactacctaacagagcgttgcttctttcagaaaaggattcattgcttaatgaggcaaattcaatagcatctaaaatagcggagcttaattcttcattgaactcattaaatgatgacgttcagtttattactaacgaaatcgatagaataaataagaaatacattacagacgacgatgtagttgaaaaagatctcattgctcaagtaattgataccatatctactgaaaacgtttcaaaaaatattcaaattaaaatcaataatgaagaccttaacttcaacaaggccaacagctccatcaaggaattaaaaaaagaccagaaaaaacttctttctaccaaagaaagggaagaactgaattcatcctttatgtccaaactgttggcaaatattgaagcactaggttcgacagggataaatcttagcaaagttaaaacacccactgattataaacagttgcttggtggtggtgctgctgaggctgctaggggactacttgcttatcaactctctatactacaacaaattcatggcgctaaatcttgcgtagtgcctcctttcgttatcgatacacccaaccagcaggaacaggcaggataccgttatgaaactgttattaaagaattaatgcgtagtgttcctcaggattatcaaataatactatgtgcaatggaaaatgatgcattaaataaatttaaacatgatgctaatgttattgagttaaattcaaatagacttttgactgcttcacaatataattctttgaggtctgaatataaatatcttcagtcaatgattacaggtcaaagtgagaaggagtaa

SEQ ID NO: 92432 - DNA, 1086 bp, Enterobacter aerogenes
atggggttagctgaaacattagttagtattccgcagtctgaaagaggcggtgagattgctcaacgtgggtttgactatcaaacttgctgggctttatctcaaatgctggaatatgaactagatgaaaagaactatgtgtttatcttcgaatatcatgatgatgttcttattcttgatgacgaagtttctccaacacaactcacatttgctcaagtaaaaacaagagagaaacactggactgcatccactcttagtaatagcaccaagaagaacccaatatctatcatcggtaagttatttattcatcaaaagaatttcgccgaatattcacccaagctcctttttgttactaatgcttctttcaatctatgtgaggaaaacggtggtaagtcttgttttggtgcaaatgaagtcaaagtggagtatcagacgagctttaagaaagcaatcaaagatcaagtaaagcttgatgactccagtatcgatctttctgttatgcgtttcgttcaatcctcattaagcctagatgaccacattacacatctaaaaggtaaactatgcgatttccttagcaagaagtttggcgatagcattagcctgagtgttaatgcattagcttctttgcttgaacaggcgtgtcgagaaaaatccaaggtaaaatccgcagatattattaattttcctgaacttatctcacgaaagggtttctcatcagaagcattgaatggtgtgcttgattccttgaatgcaagtaatagtttaaagcctgattgggacaaagctagtcccctattcaatgatcttggcaaaacatcgcttcagctcattatcctgcaagccatgttctcacaagtttgcatcgaccttaaccaaaacaaaaaaaatccttcgactgtatatctagaatatgcaattagcctttacgatgaggcgagtgctcactcggatttgaaattatatctaactgaaaccatgtacaaaattgatgcactttgtccagattatgcattgactttaaagtcagggaagaaagaatgcatagttatttactcaataatccagaagctcttagagggaggtgaataa

SEQ ID NO: 92433 - DNA, 1653 bp, Enterobacter aerogenes
atgaaaagcatatactttaaaagtgctcatatattatcccttcgcgataagaaaggattctccttcaagttctcacctgatattaatatcattacaggtgagaacgacacaggtaagtctagctttattaagagcttatatcatacattaggtgctgatgttcgactggataaaaagtggaaagaagataactttgtttcaaaagttgttatttgtgttaataatcgtgactatgcgtttcttcgccacgaaaaacgtatttccattttcgatataacagcaggacaagagcatcacttagtgacctctagctctcgtgcagagattgcattagctgtgcgtgatgtctttgatttcaatttggagcttgtgactaaaactaatttggttcagggacaagcacaaccagcaagtctttatctcccttactatattgatcaagataacggttgggggaaagttttagattcatttagcagtttggctatgtatgaggactggcaaaaaaatatcttgaattttcatactggtgtaaaaccaaaggagtactatactttacaaggaaagattaatttaattgatatcgatcttgttgaaatccgaacgacgttaaaagctctaaagagagctaaaaagcgattcgaagagtcatttggaagagtacttttcgatgtggatgtaaaatattatgaagagctgctggaacgtttccttcgtaagtgccaagacttacatcaagaagaaacagaatacagaattaagctcataaaaatattatctctacgagatgaattagtaacagaaatagaggaatcaaaaagacagctcgatgaaaatgatatagattctttgctaccatcggcaggcttagaagcaagatatgtagtacttgagaataaagaaaagctattgcaaatcataccaaagttgtatgaggaaaaatctgtatatgatgatcaactctctaaaattaaagaagatttgaaacaggctataagcttaagctcagaactcaaaaacatgcttctggaagtcaaagagcaactgactcttcaagacgttattaagtctcaagcaagtaagcaggttgaggtaactttcgatgagcaaattaacgaattactgctaaaaataggcgaattggatgttgctagaactcagctttcaaaagaaatagcaaagttcgaagataaaaagcgagcaaaagaaatcaatgataagtttaaagagtcactgaagtttgcgcaaactgagttaggtatcaaagatcctaaagttggaactattcttcaatatggtccgatttctaagagcgaaacaggcagccgtgctccaagatcaatattggcttatcactatgctcttctaaaaacaatagaagataaatcgacaagtcctatgcttccagtagtaattgactcgcctaaacaacaagatccagatccgcgtacaacaaaaaagttattcgatttatgtattaatggtttatcaactaatagccagctaattatcggctcagtttcatttgaaagagaaacgaatcagtttaaaacacttattatgactgaaaaatacagtctgctaaaatcagagctttacaatcaggtttatcaagagattatgcctctttatgaacgagctgcgttatcataa

SEQ ID NO: 92434 - DNA, 1185 bp, Enterobacter aerogenes
atggctgagttacatgaggttaaaccgagagaacaagcaggcagagacacattagaacgatataacgctcaaattcgagcggccagtatcgcgtgtttatcaattttagaaggtaaagatgtaaaacgtgtgttttgtgaatttcacgacgattttgtggtcgagagagttgtcgctaatgatatccattatacctttgtgcaagtcaaaactaaggagaaattacgtgaaatatggaaacttcgagaagtatttggaatattaaaaagaaaaactaaaaaaaaccctcaaacagatgagatgattagagatagttttgtcggtaaactattacaacacactataaattttgaagatacctgtaaggaagtcatttttcttacaaatacccatattgacgaagatattgagaatgtcattgatgatattaaaaccgatgcgttttccagtgtacattgtaaactgattattgattcgtttaataactgcttcatttctatcagagacgggaagaaaaatctcgaaattgaagaaataaaagaaaacctcaagaaattaaaatttaaaaccgatgttgaatatataaaaagcaaacatgaaacatttgagattcttgcaaaggaaaaaatttttaaatacagcgaaatagatttatcacatattgaagctaaggagatattactttctcttttagctcttgttaataataagtcaagcgtaaaaatcaacgattgctcaaggggcaatattaaggatctgtctggaatagacatagatgatttattggatgtactgagtatctccaaaaatgcttattatgagtttctttataatggggatgagcatgcattgaaatcagcatctgtgattgagagattgttaagaaaggctggagctagtgaaagtcaaattgatttttttgcaaggtgtaaaataaaatgggatcagtggttaagaaaaaacagacatgtaatttctgacttagattacattactatagatagtgaaataaattcaacattagataagctgacatttatgcatggtgttttatttctctcaggcttaagatcggttgttaatgaattacatgattcgttatttgaaaataatttacttaattctttagataaagaagctttgactggaagcctctttgcgagacttgtagagcgttcaaaatga

SEQ ID NO: 92435 - DNA, 1752 bp, Enterobacter aerogenes
atgaaattattaagtctcaaaataaatggaagagatttttcaggtcttgaatcagatgagcttatttttggggagcatataactgagctttatggcccaaatggatgtggcaaaactccattattacaatctatctcctattgcttagggtatccatgtaagttcagagaggatatttataaactatgcaaatcggccacccttacttttaccataggaaatgataattttagggcgacaagagattttgaacatactgagttcattttatcattagtatgtaatagcaaaaaatcaatgttttataatcaagcggattactctaaatatatcctagaaaagctatcactagcatatccatctcttcttacaacccaaaataagcaatcatacccgtatttagcaactattttaccaattttttatttagatcaggatttcggatattcaaagttttattattcaccaaataattttataaaagatcaattctctgaaatgcttagaattgtattctttttgcccgaaaaacattccttcgatgttaagaaaaaatccattaatataatggaggaaattaaatacctagataactcgttagctatacaaagaagagatattgaaatagctaaagaggctaataaagataaagatatagaatctatcgataattcaattatagatctaaaaaatgaactttcagtattgaaaaatagtaagtcattgaagaatgattcccttcatagcattgatgaaattataagaagacaaaaagaaaacttgagggatttaaacgaagaactgagttttatcgctagaagagagtcttcattagttcagataatgaaagaaattaatacagagatcaatacgttaaaccttaacgaagaagctaaaagaatatttcgttcttttgaagaaatatgtccgtctcttgattgtaaaatgttttcgcgtagttcggaaagttatgcaaaacatctcttatatcttaaagatcaaatcaaggatattgaaagaagcttgaatttggatggaggacgatatgatcaaatcacacaagaaatagcttatgttaataaaactgtcgaagacctcaactctatgagaaatggaatcatagaagaagaggacctctcatcagtaattgatgcaatttcttcaataacatctatgttgtttaaattacagttagaaaaaagtgagttacataaaatatcaattttggaggataagtatgtcgaaatgcttaataagcgggaaaatgcgctagataaactggaggggttaggtaaaaatagacagtcaataccacggctaacgcgggttaaatctacattgagagaaaagtacatcagttggctaaaagttttaaaaaccccaaacatagattttaatatatcatttgagcaagattttagccctgttctaggttttgaaactttagagcaactcaaaggaagtacaaaagtaagagctatacttgcttatcgtagtgcattaattgaaagcatgcttgaattagaaaataaatcgttcatgtttgcaatattcgatacgcctaaacagcatgagatacattacgaagatatcaataatttcatttttaatttgaagaagttatctcaaaagtttaattttcaatttatattctcttccacagagtataagtatttaggtgatgaaaatgatattttgcttacaccaaaatatcctggtgaacagcatgaaatgtttttaagaagatactag

SEQ ID NO: 92436 - DNA, 1086 bp, Enterobacter cloacae
atggggttagctgaaacattagttagtattccgcagtctgaaagaggcggtgagattgctcaacgtgggtttgactatcaaacttgctgggctttatctcaaatgctggaatatgaactagatgaaaagaactatgtgtttatcttcgaatatcatgatgatgttcttattcttgatgacgaagtttctccaacacaactcacatttgctcaagtaaaaacaagagagaaacactggactgcatccactcttagtaatagcaccaagaagaacccaatatctatcatcggtaagttatttattcatcaaaagaatttcgccgaatattcacccaagctcctttttgttactaatgcttctttcaatttatgtgaggaaaacggtggtaagtcttgttttggtgcaaatgaagtcaaagtggagtatcagacgagctttaagaaagcaatcaaagatcaagtaaatcttgatgactccagtatcgatctttctgttatgcgtttcgttcaatcctcattaagcctagatgaccacattacacatctaaaaggtaaactatgcgatttccttagcaagaagtttggcgatagcattagcctgagtgttaatgcattagcttctttgcttgaacaggcgtgtcgagaaaaatccaaggtaaaatccgcagatattattaattttcctgaacttatctcacgaaagggtttctcatcagaagcattgaatggtgtgcttgattccttgaatgcaagtaatagtttaaagcctgattgggacaaagctaggcccctattcaatgatcttggcaaaacatcgcttcagctcattatcctgcaagccatgttctcacaagtttgcatcgtccttaaccaaaacaaaaaaaatccttcgactgtatatctagaatatgcaattagcctttacgatgaggcgagtgctcactcggatttgaaattatatctaactgaaaccatgtacaaaattgatgcactttgtccagattatgcattgactttaaagtcagggaagaaagaatgcatagttatttactcaataatccagaagctcttagagggaggtgaataa

SEQ ID NO: 92437 - DNA, 1653 bp, Enterobacter cloacae
atgaaaagcatatactttaaaagtgctcatatattatcccttcgcgataagaaaggattctccttcaagttctcacctgatattaatatcattacaggtgagaacgacacaggtaagtctagctttattaagagcttatatcatacattaggtgctgatgttcgactggataaaaagtggaaagaagataactttgtttcaaaagttgttatttgtgttaataatcgtgactatgcgtttcttcgccacgaaaaacgtatttccattttcgatataacagcaggacaagagcatcacttagtgacctctagctctcgtgcagagattgcattagctgtgcgtgatgtctttgatttcaatttggagcttgtgactaaaaccaatttggttcagggacaagcacaaccagcaagtctttatctcccttactatattgatcaagataacggttgggggaaagttttagattcatttagcagtttggctatgtatgaggactggcaaaaaaatatcttgaattttcatactggtgtaaaaccaaaggagtactatactttacaaggaaagattaatttaattgatatcgatcttgttgaaatccgaacgacgttaaaagctctaaagagagctaaaaagcgattcgaagagtcatttggaagagtacttttcgatgtggatgtaaaatattatgaagagctgctggaacgtttccttcgtaagtgccaagacttacatcaagaagaaacagaatacagaatcaagctcataaaaatattatctctacgagatgaattagtaacagaaatagaggaatcaaaaagacagctcgatgaaaatgatatagattctttgctaccatcggcaggcttagaagcaagatatgtagtacttgagaataaagaaaagctattgcaaatcataccaaagttgtatgaggaaaaatctgtatatgatgatcaactctctaaaattaaagaggatttgaaacaggctataagcttaagctcagaactcaaaaacatgcttctggaagtcaaagagcaactgactcttcaagacgttattaagtctcaagcaagtaagcaggttgaggtaactttcgatgagcaaattaacgaattactgctaaaaataggcgaattggatgttgctagaactcagctttcaaaagaaatagcaaagttcgaagataaaaagcgagcaaaagaaatcaatgataagtttaaagagtcactgaagtttgcgcaaactgagttaggtatcaaagatcctaaagttggaactattcttcaatatggtccgatttctaagagcgaaacaggcagccgtgctccaagatcaatattggcttatcactatgctcttctaaaaacaatagaagataaatcgacaagtcctatgcttccagtagtaattgactcgcctaaacaacaagatccagatccgcgtacaacaaaaaagttattcgatttatgtattaatggtttatcaactaatagccagctaattatcagctcagtttcatttgaaagagaaacgaatcagtttaaaacacttattatgactgaaaaatacagtctgctaaaatcagagctttacaatcaggtttatcaagagattatgcctctttatgaacgagctgcgttatcataa

SEQ ID NO: 92438 - DNA, 1110 bp, Enterobacter cloacae
gtggctaaaaataaagcggtaaacgctggagttgatgcgttaacaggttttgagtttcaaagaaactgtgcgttgtatcttttgttagataatttcaattcttttatcaataaagagttctttatttgtatcgaacatcacgatgattttctattttgttataaaactgattgtttaagttatataaacgagatacatgcctatcaagcaaagaaacttagcgggaaaatatggactatcgattctaggttttctgagatggtatctaaaatactattggtaggcgaaaacttaagaaatgatgcttttgaaaaaagtgaagattataaacaccagctaacatttatatcaaatacagaaatagaattaaaatactcaccgtcaaaggcgttaaaaaaacaaggtattgctgagcaggtattaagggttaatgagcaaaactctatctgtgtttatgatgaattgcataaaaacattaagaataaaattgaagagaaagttacagatatttgtaatgaagaatcttctgtttttcatcgtaaagaactaagtaacctaaaaattcagtgggtagatttcccaagaacggctgcaaaacaaaaagaatcgcttattggacttatgtctaggaaattttcccatatagctgactcgaaagcagccattgaggtaatacttgctctatttaggaatgttgaaactgtatataatcaagggcaggaaatatgtctactagatccaacaaaaagggttgaaggcgaagaagttaagaaagttatgaatataattgattcacagcaaaaggcattcgattattggcgtacctctgcacagcagctctcaatacaatttagaataccccttaatatacagaaaaatcatgaggcttatataattaattcttttgagctgctcaaggatatgagtaattttgactaccagctcattaaaaatttcgttagaaataatgattacacggctcaatattactctcttcaagacatattaactgcatacattgatggtgttagaaagtctcactctataaatttgactaacgtcgatatgttttttgcagttctgtgttcgtacgttgagtgctatgattaa

SEQ ID NO: 92439 - DNA, 1764 bp, Enterobacter cloacae
atgaagaccattataaattttgatagattgtttgtcgtctctgaaagtcataatgtatattttgatcagaggtttacgaatggggtaaatataatcagtggatgtaatacctcaggtaaaagcactctattacagagtattttattcacctttggaattaatgatgttaaagatggattaaacgaaataattcgatacaatcctatatttagattggattttagtatcacaaaaaaaggtgtagagaagaagtatgtaatattgagagaggcaggggttatatatttaaaagaggacggtgggagtattgtaagtttcaatggaatagatgctgatagtcgatttgaacatgtgaaacttaaagagaaattatctcaattgtttggttttggcatgcttcttgaacagaaaggtgaactaaaaacagcatcaatagaatgtatttttcttccctattatatttcccaatcagtcggttgggtttatttaagggagtcgttctctaatctcggattttataaggacttcaaagatacatatcttgattactatcttggtatagagaattcctttgataaagagtctttttatcaactaacaaaagagcgacttcaacttcaatcgaaaatttcttcattaaataaatatagcaatgaacctcgcttggttatttctaaattgttggatgaggagttcggtgaagaagctcaaagatacattgatagctatatacatttggtggctctcttagatgaagaacgtgatatttatactaatctgggtaataaattatcattaacaaaaaatcatatcaagatccttaaaagaactaaaagaaacattaaacatcaaaattataataatgttgatcgttgccctgcatgtacgcaaattttgccatattctttagaaggcttatatggttttcatcaaaacataaatgatacagataaattgttagagcagttaaatattaagattcaaagtacgcagtccgacattaactcctctcgtacaaaaattaaaaaactagaaattgaaatatcgtcaaagtactcgtattttcttgagaaaaaatcacaaactgtatccgttaatgaatggatcgataataaggcaaatgtacgcttattgaataacattcacaacgagatagaggaacacacgaagagatctgatgagattaaagagttgataggtgagatgggtgaggagcagtctctttttgtagagcgatcacacaaagaaaaagatttcaaagatatttttcaaaaatatctcaatgagatgcaattgtttaatgtaaaagaagcaagatatactaatctttataaaattaattcattcccttttcaaggggttgagcttcacaaaacagtaatgtcttatcattttgcattaaatgatttgataagcaaaagtgagaatatacatcgacttccatttatgttagacgcaattcttaaggaggacatcgatgataggaactttgaccttatactttcctttgtaggaaagaaccttccaaaggatactcaatcatttatatcaatttctgaatattctgaagataaactcttgaaagatggtaaagaggttagtgcatttcgaagggctagagttaaaaatatcaaggacagatatttcccagatgatacgaacttattctttattggtgatgggaaacacgagagaacatttttatccaaaccgttggatctgaatcttgatatctatgttgatacttgtcagcttactgaataa

SEQ ID NO: 92440 - DNA, 1110 bp, Enterobacter cloacae; identical to SEQ ID NO: 92438

SEQ ID NO: 92441 - DNA, 1764 bp, Enterobacter cloacae
atgaagaccattataaattttgatagattgtttgtcgtctctgaaagtcataatgtatattttgatcagaggtttacgaatggggtaaatataatcagtggatgtaatacctcaggtaaaagcactctattacagagtattttattcacctttggaattaatgatgttaaagatggattaaacgaaataattcgatacaatcctatatttagattggattttagtatcacaaaaaaaggtgtagagaagaagtatgtaatattgagagaggcaggggttatatatttaaaagaggacggtgggagtattgtaagtttcaatggaatagatgctgatagtcgatttgaacatgtgaaacttaaagagaaattatctcaattgtttggttttggcatgcttcttgaacagaaaggtgaactaaaaacagcatcaatagaatgtatttttcttccctattatatttcccaatcagtcggttgggtttatttaagggagtcgttctctaatctcggattttataaggacttcaaagatacatatcttgattactatcttggtatagagaattcctttgataaagagtctttttatcaactaacaaaagagcgacttcaacttcaatcgaaaatttcttcattaaataaatatagcaatgaacctcgcttggttatttctaaattgttggatgaggagttcggtgaagaagctcaaagatacattgatagctatatacatttggtggctctcttagatgaagaacgtgatatttatactaatctgagtaataaattatcattaacaaaaaatcatatcaagatccttaaaagaactaaaagaaacattaaacatcaaaattataataatgttgatcgttgccctgcatgtacgcaaattttgccatattctttagaaggcttatatggttttcatcaaaacataaatgatacagataaattgttagagcagttaaatattaagattcaaagtacgcagtccgacattaactcctctcgtacaaaaattaaaaaactagaaattgaaatatcgtcaaagtactcgtattttcttgagaaaaaatcacaaactgtatccgttaatgaatggatcgataataaggcaaatgtacgcttattgaataacattcacaacgagatagaggaacacacgaagagatctgatgagattaaagagttgataggtgagatgggtgaggagcagtctctttttgtagagcgatcacacaaagaaaaagatttcaaagatatttttcaaaaatatctcaatgagatgcaattgtttaatgtaaaagaagcaagatatactaatctttataaaattaattcattcccttttcaaggggttgagcttcacaaaacagtaatgtcttatcattttgcattaaatgatttgataagcaaaagtgagaatatacatcgacttccatttatgttagacgcaattcttaaggaggacatcgatgataggaactttgaccttatactttcctttgtaggaaagaaccttccaaaggatactcaatcatttatatcaatttctgaatattctgaagataaactcttgaaagatggtaaagaggttagtgcatttcgaagggctagagttaaaaatatcaaggacagatatttcccagatgatacgaacttattctttattggtgatgggaaacacgagagaacatttttatccaaaccgttggatctgaatcttgatatctatgttgatacttgtcagcttactgaataa

SEQ ID NO: 92442 - DNA, 1086 bp, Enterobacter cloacae
atggaaagtaatattttaggtcatgctcagagagaaacttcaggagcaactacatttggaaaatataatttccaatatcattgggctttatgcagaataattgaaaaacataaatccaatgcagactatgcattattaattgaatatcatgaggatgtcgttatcgcagactcattgtttggcagttcggcgaagtttgaattttttcaagtgaaaaatactgggaattccttcactgttgactctttaactaaacgagtaaaaggtgcagagggacttaagaactccattctaggaaaactattaagctcatgtataggcactgagtatgaaacacgtattacggaaataggtcttgtatcctctagtggcttctcatttgatcagaaagataataagttaaagttagatattataacttcgggtgatcttagcgtggattgtctatcgggcttaactgggaaattaaagtacgagcttgggatagatatttttccagaaaatctaaagttcatcattccaaaaataaagttagaaaatcaagaagaattcgttattgccagatttgctgaattagtaaatgaaatatttccaaatagtcattgtaatgctgtcaatatttatagggcaattatcgatgagattcatcgcaaaggacagaatacttacgactttactatgtgggagaaaatggtagaggataagtctctcacatctcatacggtaaaagatgtcatagctgtaaatacaacgagtccaaaatttgaagactttgagaaagactttgagtatttagctaaaagcgatatgaaatggaataccttaacatatcgaaagatggtaagaaaaataaaacaaatttacttacgtagagtcgggtatgcttcagcttttgatatgaatataatgagaatagctcaacaggcgctcagtaatgttccggaagaagactatactgaaacaagcgattacattaaggcagttgttatgaaagctaaagagctgaatattgaaagccaaatcccagaagatgatgatatactttgcgagataatttactgttttttgaaggtgatgcatgaataa

SEQ ID NO: 92443 - DNA, 1734 bp, Enterobacter cloacae
atgagaagcttgcaatttcaacgattggttctgatatcagattcgaaaagacttgcgaatcagttcacgttcccgaagagattgaatctaattacaggagaagataacagtatcggcaagtccactctagccaagagtttactatggtcgctaggatgcgatccagttatcgacgaagaatggaaatcaaatgacattaaatcgatattatatttcactataaataataaagaatatttttcttgccgtggaagccactcaataattttgggcgctatcgatggtgaagcgaaaagatacacacatataactggtgatttttcacaagacctatcagatcttgttaactttaaaatgaagcttcctaatcggactgatgggaaattagagactcctccgccagcatattattttttaccattctatattgaccagataaaaagctggagttctccttgggattcatttgaaaacttaggtcagtatgccaactggaaaaaatcgttaataaagtattttactggctatctgaaaccagaacattttgaattagaagaagaaatttatgaatatagtgaggtaaaaaaagaatcaacagcaaaaatagaaaaatttcaaagcgcagttgacgtcatagttgataattctgctgatatcaccatagcattagataatgagaaatttagcgaaattcagaaagagataaatactgagcttcaagagtttatcgattaccaaaggaagctttatgatgctcaggctacgattacctcaaatatatatgatctcgaaaaacagtatgaattagccaccagttctgcaaacgaactcgaagaagattataagtttgcggtcgagtctataccgacagatcatttagagtgcccattgtgtggtactcttcacgataactcactgactaacagagcattgcttctttcagagaaggattcgctacttgacgaggcaaactcaatagcatcagaaatagaggcgcttagatcctcattatttgagttaaatgaagtagctcaatttgctactaatgaaattgaaagaattaataagaagtatctcaccgatgacaatgagggcgaaaaaacactcattacacaagtaattgatgctatttcgaaagaaaaggtctcaagaagtattcaagttaaaattgataatgaagatcttaaaatcagcaaagccaataactctgtcgcagaattgaaaaaagatcagagaaaacttctttcaaacaaggataaggaagaactgaattcttcttttatgtcaaagctattgggaaatattgaagcactaggttcaacaggagtaaatcttagcaaagtgaaatcgcctactgattataaacagttacttggtggcggtgctgctgaggctgccaggggattgcttgcttatcaactctccgtactgcaacaaataaatagtgctaaaacttgcatagtgcctcctttcgtcattgatacacccaaccagcaagaacaggcggagcatcgttatgaaaccgtcatcaaagaactaatgcgcagtatcccagaggattatcagataatactgtgtgcaatggagaataatgcattaaatgaatttaaacatgatgccaatgttattacattaaattctgaaaagttattggattcttcccaatatgactctctaagatctgagtataaaaacattcaattggctgtaagagaaacgagggatgatgattaa

SEQ ID NO: 92444 - DNA, 1110 bp, Enterobacter cloacae
gtggctaaaaataaagcggcaaacgccggggttgatgcgttaactggttttgagtttcaaagaaactgtgcattgtatcttttgttagataatttcaattcttttatcaataaagagttctttatttgtatcgaacatcacgatgattttctattttgttataaaactgattgcttaagttatataaacgagatacatgcctatcaagcaaagaaacttagcgggaaaatatggactatcgattctaggttttctgagatggtatctaaaatactattggtgggcgaaaatttaagaaatgatgcttttgaaaaaagtgaagattataaacaccagctaacatttatatcaaatacagaaatagaattaaaatactcaccgccaaaggcgttaaaaaaagaaggtattactgagcagatattaaggattaatgagcaaaactctatctgtgcttatgatgaattacataaaaacattcagaataaaattgaagagaaagttacagatatttgtaatgaagaatcttctgttttccatcgtaaagaactaagtaacctaaaaattcagtgggtagattttccaagaacagctgcaaaacaaaaagaatcgcttattggacttatgtctagaaagttttctcatatagctgactcgaaagcagccatcgaggtaatacttgctctatttagaaatgtggaaactgtatataatcaagggcaggaaatatgtctactcgatccaacaaaaagggttgaaggcgaagatgttaagaaagttatgaatataattgattcacagcaaaaggcattcgactattggcgtgacgaagcacagcaattctcaatgaaattcagaataccacttagcatacagaaaaatcatgaaaactatatacttaactcttttgaactactcaaggatatgagtaattacgattatcaaatcattaaagactttgttagaaataatgattacacaactcaatatttttctcttcaagacgcattaactgcatatgttgataatgttagaaaatctcattctataaacctagataatattgatacattttttgcagttctgtgttcatacgttgagtgctacgattaa

SEQ ID NO: 92445 - DNA, 1764 bp, Enterobacter cloacae
atgaagacaattataaagtttgatagattgtttgttgtctctgaaagtcataatttatatttcgaccaaaagttttcaaataaaataaacataataagtgggtgtaatacctcaggtaaaagtactttaatacagagtattttatttacctttggaattaacgatgttaaagatggcttgagcgaaattattcgatacaaccctacgttcagattggatttcagcctcactaaaggaggcgtagataaaaaatatataatagtaagagagcttggtagcatatatttaaaagaggatgggggaaatgtttttagttttcatggaattgactctgatagtcgagttgaacatgtgaagcttaaggagatgttatctcaattatttgattttaacatgcttttagaacagaagggtgagctaaaaaaagcatcgatagaatgcatgttcctgccttattatatttctcaatctgtagggtgggtttatttaagagagtcattctctaatcttggtttttataaagactttaaagatacgtatcttgattattatcttggcatagaaaattcttttgataaagaatatttttataaattaacaaaagagcgggcacaacttcagtcgaagatctcctcattgaataaatatagcgcagagcatcactttgttgtttctaaattactggatgaagagtttggtgatgaggctcagaagtatatagatggttatattaaattagtagcatcattagatgaagaacgtgatgtatatactggtttgtgtaataagttatccttaactaaaaatcatgtcaagatactaagaagaactaaaagaaatattaaaaaccaaaactataacaatattgatcgttgtcctgcatgtacgcaaatacttccttattccttagaagggttatatggttattatcaaaacatcaatgatactgataaactatcggagcaaataaataataaaatacaaaaaatacagtctgacattaatagttcacttgcgaaaattaaaaagttagaaattgatatatcttcaaagtattcatattttcttgagaaaaaatcacaaaatttatctgtcaacacatggatcgataataaagcaaacatacgtctgttaggcaatattcatgaagagatagaagaatatacaaaaaggtctgatgaaattaaaggattaattgatgggatgggagaggagcagtctctttttgtcgagcggtttaacaaagaaaaagatttcaaggaaatatttaaagaatatcttaatgatatgcagttgttcaatgtaacagaacctagatatacagatctttataaaataaattcatttccttttcaaggggttgaacttcataaaactgtaatgtcatatcattttgcattaaattctttaataagaaaaacagacaatatacatcgacttccatttatgcttgacgcaattcttaaggaagatatcgatgacagaaattttgatctcatactgtcgtttgtgggaaaaaatcttccgactgatactcaatcatttatatcaatgtctgagtatgctgaagataacctcttgaaagatggtaaagagataagtgcattccgaagagccaaggttaaagatattaaaaatcgatacttccctgatggtacgaatttattctttattggtgatgggaagcatgagagaacatttttatcaaaacctttggatttaaacctcgatatttttgtcgatacttgtcggcttactgaatga

SEQ ID NO: 92446 - DNA, 1185 bp, Pectobacterium carotovorum
atggctgagttacatgaggttaaaccgagagagcaggctggaagagacacattagaacgatataatgctcaaattcgggcagccagtatcgcgtgtttatctattttagaaggtaaagatgtaaaacgtgtcttttgtgaatttcacgacgattttgtggttgaaagagttattgctaatgacatccattatacttttgtgcaagtcaaaactaaggaaaaattacgtgaaatatggaagcttcgagaggtttttgggatcttaaaaagaaaaactaaaaaaaatcctcagacggatgagatgattagagatagttttgttggtaaactattacagcataccataaattttgaagatacttgtaaggaagtcatttttcttacaaatacacatattgacgaagatattgataatatccttgatgatatcatatccgatacattttccaatgttcattgcaagcttattattgattcatttaataattgtttcatttctatcagtaatgagaataaaaaacttgatattgaaggtataaaagaaaatcttaaaaaattaaaatttgaaaccgatgttgaatatataaaaagcaaacatgaaacgtttgagatcctcgcgaaagaaaaaatattcaagtacagcgaaatagatttgtcacatattgaagctaaggagatattactttctcttttagctcttgttaatagtaagtcaagcgtaaaaatcaatgattgctcgaaagaaaatattaataatttgtcaggaatagacattgatgatttattggatgtacttagtatctccaaaagtgcttattacgagtttctccatgatggggatgaacatgcattgaaatcagcatctgtaattgaacggttgttaagaaaagcaggggctagtgaaattcaaattgatttttttgcaagatgtaaaataaaatgggatcagtggttaagaaaaaatagacatatcatttctgagttggactatgtcactatagatagtgaaataaactcaacattagataagttgacatttatgcatggtgttttattcctttcgggtttaagaaccgctgttaatgaattacatgattcgttatttgaaagtaatttacttaattgtttagacaaagaagctttgactggaagcctttttgcgagacttgtagagcgttcaaaatga

SEQ ID NO: 92447 - DNA, 1752 bp, Pectobacterium carotovorum
atgaaattattaagtctaaaaataaatgggagaaatttttcaggtcttgagtcagatgagctcatttttggagagcatattactgagttctatggtccgaacggatgtgggaaaacaccgttattacaatctatatcctattgcttagggtatccatgtaagttcagagaggatatttataggctatgcaaatctgccacccttacttttactatagggaatgatagttttagggcgacaagagattttgaacatactgatttcattttatcattagattgtaatggcaaaatatcaatgttttataatcaagcagattattctaaatatatcctagaaaagctatcattagcttatccatctcttcttacaacccaaaataagcaatcatacccatatttagcaactattttaccaattttttatttagatcaggattttggatactcaaaattttattattcaccaaataattttataaaagatcaattttcagaaatgctcaggattgtattctttttgcccgaaaagcattcattcgatgtcaaaaagaaatccattaatctaacggaggaaattaaatatcttgataactcactggctatacaaagaagagatattgaaatagctaaagaggctaataaagataaaaatatagaatttatcgataattccattatagcttttaaaaatgagcttactgtattgaaaggtagtaaatcattaaagaatgattccctccatagtattgatgaaattataaaaaaacagaaagaaaacttgagggatttaaatgaagagctaaattttatagcaagaagagagtcttcattagttcagataatgaaagaaattaatacagaggtcaatacgttaagccttaatgaggaagctaaaaggatatttcgttcttttgaggaaatatgtccatccattgattgtaaaatgttttcgcgtagttcagaaagctatgcaaaacatcttttatatcttaaggaccaaatcaaggatattgaaagaagcttaaatttagatggaggacgatatgatcaaatcacacaagaaatagcttatgttaataagactatcgaagacctcaactctatgagaaacggaatcatagaagaagaggacctctcatcagtaattgatgcaatttctgaaataacatctatgttgtttaaattacagttagagaaaagtgaattgcagaaaatatcaattttggaggataagtatgtcgaaatgcttaataagcgggaaagtgcgctagataaactggaagggttaggtaaaaatagacagtcaattccacggttaactagggttaaatctacattgcgagaaaagtacatcagttggttaaaagttttaaaaaccccaaatgttgatttaaatatatcatttgagcatgattttagccctgttctgggttttgaaactttagaacaacttaaaggaagtactaaagtacgagctatacttgcatatcgcagtgcattaattgaaagcatgcttgaattagaaaataaatcgttcatgtttgcaatatttgatacgcctaaacagcatgaaatacattatgcagatataaataactttattgttaatttgaaaaaactatctcaaaaatataattttcaattcatattctcctctacagagtacaagtatttaggtgatgaaaatgatatttttcttactccaaaatatcctggtgaacagcatgagatgtttttgagaagatactag

SEQ ID NO: 92448 - DNA, 1185 bp, Pectobacterium carotovorum subsp. actinidiae
atggctgagttacatgaggttaaaccgagagaacaagcaggcagagacacattagaacgatataacgctcaaattcgagcggccagtatcgcgtgtttatcaattttagaaggtaaagatgtaaaacgtgtgttttgtgaatttcacgacgattttgtggtcgagagagttgtcgctaatgatatccattatacctttgtgcaagtcaaaactaaggagaaattacgtgaaatatggaaacttcgagaagtttttggaatattaaaaagaaaaactaaaaaaaaccctcaaacagatgagatgattagagatagttttgttggtaaactattacaacacactataaattttgaagatacctgtaaggaagtcatttttcttacaaatacccatattgacgaagatattgagaatgtcattgatgatattataaccgatgcgttttccagtgtacattgtaagctgattattgattcgtttaataactgcttcatttctatcagagacgggaagaaaaatctcgaaattgaagaaataaaagaaaacctcaagaaattaaaatttgaaaccgatgttgaatatataaaaagcaaacatgaaacatttgagattcttgcaaaggaaaaaatttttaaatacagcgaaatagatttatcacatattgaagctaaggagatattactttctcttttagctcttgttaatagtaagtcaagcgtaaaaatcaacgattgctcaaggggcaatattaaggatctgtctggaatagatatagatgatttattggatgtactgagtatctccaaaaatgcttattatgagtttctttataatggggatgagcatgcattgaaatcagcatctgtgattgagagattgttaagaaaggctggagctagtgaaagtcaaattgatttttttgcaaggtgtaaaataaaatgggatcagtggttaagaaaaaacagacatgtaatttctgacttagattacattactatagatagtgaaataaattcaacattagataagctgacatttatgcatggtgttttatttctctcaggcttaagatcggttgttaatgaattacatgattcgttatttgaaaataatttacttaattctttagataaagaagctttgactggaagcctctttgcgagacttgtagagcgttcaaaatga

SEQ ID NO: 92449 - DNA, 1752 bp, Pectobacterium carotovorum subsp. actinidiae
atgaaattattaagtctcaaaataaatggaagagatttttcaggtcttgaatcagatgagcttatttttggggagcatataactgagctttatggcccaaatggatgtggcaaaactccattattacaatctatctcctattgcttagggtatccatgtaagttcagagaggatatttataaactatgcaaatcggccacccttacttttaccataggaaatgataattttagggcgacaagagattttgaacatactgagttcattttatcattagtatgtaatagcaaaaaatcaatgttttataatcaagcggattactctaaatatatcctagaaaagctatcactagcatatccatctcttcttacaacccaaaataagcaatcatacccgtatttagcaactattttaccaattttttatttagatcaggatttcggatattcaaagttttattattcaccaagtaattttataaaagatcaattctctgaaatgcttagaattgtattctttttgcccgaaaaacattccttcgatgttaagaaaaaatccattaatataatggaggaaattaaatacctagataactcgttggctatacaaagaagagatattgaaatagctaaagaggctaataaagataaagatatagaatttatcgataattcaattatagatctaaaaaatgaactttcagtattgaaaaatagtaagtcattgaagaatgattcccttcatagcattgatgaaattataagaagacaaaaagaaaacttgagggatttaaacgaagaactgagttttatcgctagaagagagtcttcattagttcagataatgaaagaaattaatacagagatcaatacgttaaaccttaacgaagaagctaaaagaatatttcgttcttttgaagaaatatgtccgtctcttgattgtaaaatgttttcgcgtagttcggaaagttatgcaaaacatctcttatatcttaaagatcaaatcaaggatattgaaagaagcttgaatttggatggaggacgatatgatcaaatcacacaagaaatagcttatgttaataaaactgtcgaagacctcaactctatgagaaatggaatcatagaagaagaggacctctcatcagtaattgatgcaatttctgcaataacatctatgttgtttaaattacagttagaaaaaagtgagttacataaaatatcaattttggaggataagtatgtcgaaatgcttaataagcgggaaaatgcgctagataaactggaggggttaggtaaaaatagacagtcaataccacggctaacgcgggttaaatctacattgagagaaaagtacatcagttggctaaaagttttaaaaaccccaaatatagattttaatatatcatttgagcaagattttagccctgttctaggttttgaaactttagagcaactcaaaggaagtacaaaagtaagagctatacttgcttatcgtagtgcattaattgaaagcatgcttgaattagaaaataaatcgttcatgtttgctatattcgatacgcctaaacagcatgagatacattacgaagatatcaataacttcatttttaatttgaagaagttatctcaaaagtttaattttcaatttatattctcttccacagagtataagtatttaggtgatgaaaatgatattttgcttacaccaaaatatcctggtgaacagcatgagatgtttttaagaagatactag

SEQ ID NO: 92450 - DNA, 1131 bp, Escherichia coli MS 115-1
atgatgttgttacgcgagtccattgaactaaacataagggagtatatggggttagctgaaacattagttagtattccgcagtctgaaagaggcggtgagattgctcaacgtgggtttgactatcaaacttgctgggctttatctcaaatgctggaatatgaactagatgaaaagaactatgtgtttatcttcgaatatcatgatgatgttcttattcttgatgacgaagtttctccaacacaactcacatttgctcaagtaaaaacaagagagaaacactggactgcatccactcttagtaatagcaccaagaagaaccccatatctatcatcggtaagttatttattcatcaaaagaatttcgccgaatattcacccaagctcctttttgttactaatgcttctttcaatctatgtgaggaaaacggtggtaagtcttgttttggtgcaaatgaagtcaaagtggagtatcagacgagctttaagaaagcaatcaaagatcaagtaaagcttgatgactccagtatcgatctttctgttatgcgtttcgttcaatcctcattaagcctagatgaccacattacacatctaaaaggtaaactatgcgatttccttagcaagaagtttggcgatagcattagcctgagtgttaatgcattagcttctttgcttgaacaggcgtgtcgagaaaaatccaaggtaaaatccgcagatattattaattttcctgaacttatctcacgaaagggtttctcatcagaagcattgaatggtgtgcttgattccttgaatgcaagtaatagtttaaagcctgattgggacaaagctagtcccctattcaatgatcttggcaaaacatcgcttcagctcattatcctgcaagccatgttctcacaagtttgcatcgaccttaaccaaaacaaaaaaaatccttcgactgtatatctagaatatgcaattagcctttacgatgaggcgagtgctcactcggatttgaaattatatctaactgaaaccatgtacaaaattgatgcactttgtccagattatgcattgactttaaagtcagggaagaaagaatgcatagttatttactcaataatccagaagctcttagagggaggtgaataa

SEQ ID NO: 92451 - DNA, 348 bp, Escherichia coli MS 115-1
atgaaaagcatatactttaaaagtgctcatatattatcccttcgcgataagaaaggattctccttcaagttctcacctgatattaatatcattacaggtgagaacgacacaggtaagtctagctttattaagagcttatatcatacattaggtgctgatgttcgactggataaaaagtggaaagaagataactttgtttcaaaagttgttatttgtgttaataatcgtgactatgcgtttcttcgccacgaaaaacgtatttccattttcgatataacagcaggacaagagcatcacttagtgacctctagctctcgtgcagagattgcattagctgtgcgtgattga

SEQ ID NO: 92452 - DNA, 1128 bp, Escherichia coli KTE171
atgttgttacgcgagtccattgaactaaacataagggagtatatggggttagctgaaacattagttagtattccgcagtctgaaagaggcggtgagattgctcaacgtgggtttgactatcaaacttgctgggctttatctcaaatgctggaatatgaactagatgaaaagaactatgtgtttatcttcgaatatcatgatgatgttcttattcttgatgacgaagtttctccaacacaactcacatttgctcaagtaaaaacaagagagaaacactggactgcatccactcttagtaatagcaccaagaagaacccaatatctatcatcggtaagttatttattcatcaaaagaatttcgccgaatattcacccaagctcctttttgttactaatgcttctttcaatttatgtgaggaaaacggtggtaagtcttgttttggtgcaaatgaagtcaaagtggagtatcagacgagctttaagaaagcaatcaaagatcaagtaaagcttgatgactccagtatcgatctttctgttatgcgtttcgttcaatcctcattaagcctagatgaccacattacacatctaaaaggtaaactatgcgatttccttagcaagaagtttggcgatagcattagcctgagtgttaatgcattagcttctttgcttgaacaggcgtgtcgagaaaaatccaaggtaaaatccgcagatattattaattttcctgaacttatctcacgaaagggtttctcatcagaagcattgaatggtgtgcttgattccttgaatgcaagtaatagtttaaagcctgattgggacaaagctagtcccctattcaatgatcttggcaaaacatcgcttgagctcattatcctgcaagccatgttctcacaagtttgcatcgaccttaaccaaaacaaaaaaaatccttcgactgtatatctagattatgcaattagcctttacgatgaggcgagtgctcactcggatttgaaattatatctaactgaaaccatgtacaaaattgatgcactttgtccagattatgcattgactttaaagtcagggaagaaagaatgcatagttatttactcaataatccagaagctcttagagggaggtgagtaa

SEQ ID NO: 92453 - DNA, 1653 bp, Escherichia coli KTE171
atgaaaagcatatactttaaaagtgctcatatattatcccttcgcgataagaaaggattctccttcaagttctcacctgatattaatatcattacaggtgagaacgacacaggtaagtctagctttattaagagcttatatcatacattaggtgctgatgttcgactggataaaaagtggaaagaagataactttgtttcaaaagttgttatttgtgttaataatcgtgactatgcgtttcttcgccacgaaaaacgtatttccattttcgatataacagcaggacaagagcatcacttagtgacctctagctctcgtgcagagattgcattagctgtgcgtgatgtctttgatttcaatttggagcttgtgactaaaactaatttggttcagggacaagcacaaccagcaagtctttatctcccttactatattgatcaagataacggttgggggaaagttttagattcatttagcagtttggctatgtatgaggactggcaaaaaaatatcttgaattttcatactggtgtaaaaccaaaggagtactatactttacaaggaaagattaatttaattgatatcgatcttgttgaaatccgaacgacgttaaaagctctaaagagagctaaaaagcgattcgaagagtcatttggaagagtacttttcgatgtggatgtaaaatattatgaagagctgctggaacgtttccttcgtaagtgccaagacttacatcaagaagaaacagaatacagaatcaagctcataaaaatattatctctacgagatgaattagtaacagaaatagaggaatcaaaaagacagctcgatgaaaatgatatagattctttgctaccatcggcaggcttagaagcaagatatgtagtacttgagaataaagaaaagctattgcaaatcataccaaagttgtatgaggaaaaatctgtatatgatgatcaactctctaaaattaaagaagatttgaaacaggctataagcttaagctcagaactcaaaaacatgcttctggaagtcaaagagcaactgactcttcaagacgttattaagtctcaagcaagtaagcaggttgaggtaactttcgatgagcaaattaacgaattactgctaaaaataggcgaattggatgttgctagaactcagctttcaaaagaaatagcaaagttcgaagataaaaagcgagcaaaagaaatcaatgataagtttaaagagtcactgaagtttgcgcaaactgagttaggtatcaaagatcctaaagttggaactattcttcaatatggtccgatttctaagagcgaaacaggcagccgtgctccaagatcaatattggcttatcactatgctcttctaaaaacaatagaagataaatcgacaagtcctatgcttccagtagtaattgactcgcctaaacaacaagatccagatccgcgtacaacaaaaaagttattcgatttatgtattaatggtttatcaactaatagccagctaattatcggctcagtttcatttgaaagagaaacgaatcagtttaaaacacttattatgactgaaaaatacagtctgctaaaatcagagctttacaatcaggtttatcaagagattatgcctctttatgaacgagctgcgttatcataa

SEQ ID NO: 92454 - DNA, 1092 bp, Escherichia coli KTE43
atggatagcaaaatagagatggataacccacttgcatcgcctcagcgagagtccgccggcgccgattcatatgaccgttttgaatatcaatatcattgggctttatgtcaagccttttcggcatacaaagatgctaaagacttcgctgtctttatggaatatcatgaagatgtaattattgctgattctctcgataaagaaaaagttaaatttaagtttaaccaagttaaagcaaactctactggtagctatacaatcaataaactgactaaaagagaaaagggagtgaatggtgataaaccttctcttttaggaaaactatgctcatcggttaataataaaagttatttaggtaaagttactgagttgaatttcgtgagtacagtcggtttcaatttttcacctaaagatagattaaaattaagagctgttggtttatctgatcttgattctggtgattttacaaccattacagaccatctaaataaagaagtcgaagaattttcttcttttccgaaggaaataattaggtttgtttattctgatataccgcttcagagttattatgagcacacgataacaagaattacagatagtgtggaagtcgtatttcccaaacatcttttgaaaccaaaagatatttatagagttttaatggatgctcttagaattcggggtaaagacacttttgattatgacaaatgggatgaagcgattgttaaaaaggcattaacgtatgatgacctacataaggtggtaacaaaaggtatatctggagataattcagaagtcgatctggaggctgcaaaatatattattaatgacttaaaagttagtggcttagaaaaagctaagttattaaaagagattagtgcatactctttactcgttttatccccttcattagctatgttagaaacgcgtaataacattcaagaagtcattaataaaaaccattgcgaactaaatggttctataatgtatgatctgctcgaaagattcagcgatgaaataccagaaaaaacaaaatctttatttgattctaaaagatcattgattgcagcaataatatacgaaatcatcttgagttaa

SEQ ID NO: 92455 - DNA, 1263 bp, Escherichia coli KTE43
atgagaaaattaattttagaaaaaatagtaataatatctcattcaacaaaatccgcgaggcaattcgagttcggaaggaatctgactctaataacagctaatgatggtaatagcgttggcaaatcgacattagcaaaaatgattttttggtcatttggttgcgagccttttttttccaaagtttggaaaaaacttgattgctcatcgattattatgtttagtattgatgatgagccattcgctcttcatcgttacaaaaatcaaatgagtctacgcaagaatggtcagctaataaaggcttatgataaaattactggtgctttttcagagaaatttgcagagttagtgaagtttgatgtcttgttaccgaagaaaaacacttttaatttagaagttcctcctcctgcatattattttttaccattctatattgaccagaaacggacatgggtgaaagcatgggattcttttgcaaatttgcaacagtatagtaagtgggcaaagcctgtgatatcttttcatagtggtcttatttctaaggaacattttattgttgaagaagatatctatgaagttaaggcgcaggttaatgaagttgaaagtaatatcaatgaattaactaatgctgttgcgatattaaaaagtaatattactcagcaattttatatagccaactctgaagacttggtaattgagatattgaaatatgaagaattgatcaaacttaatttggaagaatcttctaatttaaaaattgatattattggacttgattcgcaagtaaaacttgctgagtccataattagtgaattagacaaagattatattttttctgttgagaatatgaatgaaggtagtattgagtgtcctacgtgtggaacaattcatgaaaattcaatagctcacagaagtagcattcttattgataaagaaactgccgaaagacaattatctttattgttgaatgaaaaaaaacaccttcaagataagttgaaaagtttaaatgaagctcttttagagcttaaagaaaagttaaaatatgtacagatagcatttgaaaaaagtaattcaaaggagttttcagaatttacaactaataatgtcgataaacaggttgagatcattgtcggaaataaaaaggttgatcttgaaaccaaaagattaaaagagcagggattgataaagacgcaaggggatttagttacaaagcaacagaaagataaaataaaagagaactttgcaaacacttttttaaatatataa

SEQ ID NO: 92456 - DNA, 1086 bp, Escherichia coli 2785200
atggggttagctgaaacattagttagtattccgcagtctgaaagaggcggtgagattgctcaacgtgggtttgactatcaaacttgctgggctttatctcaaatgctggaatatgaactagatgaaaagaactatgtgtttatcttcgaatatcatgatgatgttcttattcttgatgacgaagtttctccaacacaactcacatttgctcaagtaaaaacaagagagaaacactggactgcatccactcttagtaatagcaccaagaagaacccaatatctatcatcggtaagttatttattcatcaaaagaatttcgccgaatattcacccaagctcctttttgttactaatgcttctttcaatctatgtgaggaaaacggtggtaagtcttgttttggtgcaaatgaagtcaaagtggagtatcagacgagctttaagaaagcaatcaaagatcaagtaaagcttgatgactccagtatcgatctttctgttatgcgtttcgttcaatcctcattaagcctagatgaccacattacacatctaaaaggtaaactatgcgatttccttagcaagaagtttggcgatagcattagcctgagtgttaatgcattagcttctttgcttgaacaggcgtgtcgagaaaaatccaaggtaaaatccgcagatattattaattttcctgaacttatctcacgaaagggtttctcatcagaagcattgaatggtgtgcttgattccttgaatgcaagtaatagtttaaagcctgattgggacaaagctagtcccctattcaatgatcttggcaaaacatcgcttcagctcattatcctgcaagccatgttctcacaagtttgcatcgaccttaaccaaaacaaaaaaaatccttcgactgtatatctagaatatgcaattagcctttacgatgaggcgagtgctcactcgaatttgaaattatatctaactgaaaccatgtacaaaattgatgcactttgtccagattatgcattgactttaaagtcagggaagaaagaatgcatagttatttactcaataatccagaagctcttagagggaggtgaataa

SEQ ID NO: 92457 - DNA, 1653 bp, Escherichia coli 2785200; identical to SEQ ID NO: 92433

SEQ ID NO: 92458 - DNA, 1185 bp, Escherichia coli KTE73
atggctgagttacatgaagttaaaccaagagagcaagcgggaagagacactttagaacgctataatgctcagatcagagcagcaagtattgcatgtttgtctatcctagagggtaaagatgtcaaacgcgttttttgcgaatttcacgatgattttgtcattgaaaaagtcattgctagtgatattcgttacacatttgtacaagtcaaaactaaggagaaactgcgagaaatttggaaactacgagacgtgtttgggattttaaaaagaaaaagtgcaaaaaatcctcagacagatgaaatgatcagagatagttttgttgggaaactattacaacatacgattaatttcggagagtcttgtaatgaaattgttttccttacaaatacgcatgttgatgaagatatagagaacattatcgatgatattgtttctgaaaccttttctaatacacactgcaaacttataattgattcgtttaataattgcttcatctcaatccaagaggatcacgaaaagctagatattgatacgataaaacaaaatcttaagaaactaaaatttgaaactgatgttgaatatattaaaagtaaacatgaaacgtttgaaatacttgctaaagaaaagatatttaaatttagcgaaattgaactatcacacactgaagcaaaagaaatattattttcgcttttggcactagtaaactcaaaatcgagtgtaaaaattaacgattgttcaagcgaaaatataaaaaagctggctggtatagatatcaatgatctcctggatgttctcagcatctcaaaacgtgcttattatgactttttagataatggcgatgaacacgctctaaaatcagcttcagtaattgaaagattgctgagaaaagcaggagccaacgacatggaagtagattttttcacaagatgtaaaataaaatgggatcagtggttaaggaataatagacatattatatctgagtttgattatatcacaatcgacagagaaattaatgcaaccttagataaactaacgtttatgcatggaaacttatttttatcaaacttaagaacattcatcaatgaattatataattcattgcatcaaaataatttacttcattccttagataaagaggctttaaccgggagtcttttttccagattagtagagcgttcaaaatga

SEQ ID NO: 92459 - DNA, 1752 bp, Escherichia coli KTE73
atgaaacttgtaagtataaaaattaaaggtaggggaattgtagggcttgaatccgacgaacttgtttttggtaaaaatattactgaattttacggacctaatgggtgtggtaaaacgccattactgcaatcaatctcttattgccttggatacccatgcaaatttagagatgatatttataaattatgcaaatctgccacccttacttttacgatagctaatgatatttttaaagccactagagactttgaacataccgacttcattttgtccttagaaagcaataaagagatattgaaattttataatgaagctgattattccaagtacattttcgaaaaactatctttaaattatccatcacttcttacaactcagaataaacagtcttatccttacttatcaactgttcttcctatattttatcttgatcaagacttaggttactcaaaattttattactcgcctagaaattttattaaagatcagttttctgaaatgcttagaatagtattctctttgccagaaaaacattcttttgatgctaaaaagaaaaatattaatctcacagaagaaattaaatatttagataattcattagcagtacaaagaagaaatattgaaatagctaaagatgtccataaagataaaaacatcgaatcaatcgatagttcgattaataatttgaaagacgaacttactgaattgaaaaatagcaaatcattgaaaaatgattctcttgtgagcatagatgcagttataagaaatcaaaaagaaaacctaaacactctcaagtcagaattaaaattcatggaaagaagagagtcatcattattacaaataatgaaagaaattaacactgaaataaatactctcaatctaaatgaggaagctaaaagaatatttcgctcttttgaggaaatttgcccttccctagattgcaaaatgtttacaagaagctctgaaagctatgcaaaacatcttttatatcttaaagatcaaattaaggatattgaaagaagtttaaaattagatagtgatcggcatgacgcgatagaacaggaaataaaacacacgagtaagaccatcgaagacctgaacactatgagaacaaatatcattgaagaggaagatatatcttcagtaattgacgctatttctgaaataacgtcaatgttatttcagttacaacttgaaaaaaatgaattaaataaaatagcgttattagaggcaaagtatgttgaaatgcttaataaacgcgagcacgctttagacgaattagatggtctcgataaaaatagacagacaatccctagattagcaaagattaagacaaccttacgagataaattcatattctggttaaaagtgttgaaaacccctaacattgatttcaatattacatttgaaaatgatttcagtccaatcatgggctatgaaaccttagagcaattaaaaggcagcactaaatcacgagctatattagcttatagaagtgcattgatagaaagcatgatagaattaaattgcaagtcttttatgtttgctatatttgatactcctaagcaacatgaaatacatcacgaagacatagataatttcattatggctttaaagaaattatctaaaaaacataattttcagtttatcttctcgtcaacagaatacaaatataacggtgatgatgatgatatcattttaactcctaagtatccaggagagcagcatgacatgttcctaagaaggtattag

SEQ ID NO: 92460 - DNA, 1092 bp, Escherichia coli UMEA 3201-1; identical to SEQ ID NO: 92454

SEQ ID NO: 92461 - DNA, 1668 bp, Escherichia coli UMEA 3201-1
atgagaaaattaattttagaaaaaatagtagtaatatctcattcaacaaaatccgcgaggcaattcgagttcggaaggaatctgactctaataacagctaatgatggtaatagcgttggcaaatcgacattagcaaaaatgattttttggtcatttggttgcgagccttttttttccaaagtttggaaaaaacttgattgctcatcgattattatgtttagtattgatgatgagccattcgctcttcatcgttacaaaaatcaaatgagtctacgcaagaatggtcagctaataaaggcttatgataaaattactggtgctttttcagagaaatttgcagagttagtgaagtttgatgtcttgttaccgaagaaaaacacttttaatttagaagttcctcctcctgcatattattttttaccattctatattgaccagaaacggacatgggtgaaagcatgggattcttttgcaaatttgcaacagtatagtaagtgggcaaagcctgtgatatcttttcatagtggtcttatttctaaggaacattttattgttgaagaagatatctatgaagttaaggcgcaggttaatgaagttgaaagtaatatcaatgaattaactaatgctgttgcgatattaaaaagtaatattactcagcaattttatatagccaactctgaagacttggtaattgagatattgaaatatgaagaattgatcaaacttaatttggaagaatcttctaatttaaaaattgatattattggacttgattcgcaagtaaaacttgctgagtccataattagtgaattagacaaagattatattttttctgttgagaatatgaatgaaggtagtattgagtgtcctacgtgtggaacaattcatgaaaattcaatagctcacagaagtagcattcttattgataaagaaactgccgaaagacaattatctttattgttgaatgaaaaaaaacaccttcaagataagttgaaaagtttaaatgaagctcttttagagcttaaagaaaagttaaaatatgtacagatagcatttgaaaaaagtaattcaaaggagttttcagaatttacaactaataatgtcgataaacaggttgagatcattgtcggaaataaaaaggttgatcttgaaaccaaaagattaaaagagcagggattgataaagacgcaaggggatttagttacaaagcaacagaaagataaaataaaagagaactttgcaaacactttttttaaatatataacgaaattgaaggttagtattgatgtttctcttataaaaagcccacttgattatagtaaagtttatgaagtgggaggggctgcagaagatgcaagagcggttttaggatattatttggctttatatgatcatatttcagaatattgtaatgaagttgtaccgccacttgttattgatacccctaatcaacaagaacaatctaccgaaaactataataaaatagtcgaggctatttccagagggctaacggagaataagcagtatattatttgtgcaatgcaacataacgcattggataatctttcacaagatgcaaaagttattcgtttggatgaaagaaaaatacttacatcttccgagtatgaagaagctaaagaacttgaagaggtatttctttttatttga

SEQ ID NO: 92462 - DNA, 1080 bp, Escherichia coli UMEA 3206-1
gtggcgttatcagatgcgttaattacagtaaatcaagcagaacggggcggtgaaaacgcgttgagaggcttttcatatcaagcctcttgggggataaattatttacttgagaaacaaaaagaaaaggagaaatatttatttctatttgaatatcatgacgatattcttgtattgaattcatctgtttctccgactagtgctgagtttatccaagttaaaacaaaaaaagatggtaaatggacactcgcagcaatagtgaacgcaacaaaagctaaacctaaatcatttgttgcaaaactatatgaccatttctatcaattcgttggtcacgaaatttatatggttctgttatcgaatgctggattcgatttcttaaatgataataacgaaaaaggtagtgatcttaataatgagcataaggaaattataattagtaaggttcaagagcagctaaatactaaaaaagaagttcctcttgataaaataaaatttaaaacatctgatcttagtttgttagatcctaactcacatttatacgggaaagttgcagtttttttgaattcttactttggggatgatcatggtattaattcaacagcattcactaaattattaatcaataagtgtaatgagaaggttagtgttgcttctagtgatatcaaaacttttgaagatttagtactaaagaaaggtatatcttcagaatttgtaactgatttattatctggactcattgcaagcataaaaataacgccaaaatgggaacaggtttgtatgttgcttggtactttctcagatccttatgaggggattaaattacaatcagtttttacacgcatatcaataaaagtgctcaatgtcaattcaatatactatctttattttctggaatttcaatcggctctaaagagtatagagcattatcgtgagatacctgttcgagacctcttctttacactcgaaaaaacaattgcagcgggggacggggatttctctttattaaatcaagaagagaaatttatgattgctatatatgcaattataaagttgacttttgaggatgtttcttatgaagaataa

SEQ ID NO: 92463 - DNA, 255 bp, Escherichia coli UMEA 3206-1
atgaagaataacgttaaatttaaaaatataaaaatactctcattaagagacagaaaagctttttcttatgagttttcagaaggggttaacttcatatatggtacaaatgatgttggtaaatcaagcctgattaaaagtctttattacacattaggtggagatttaaggcttgatgatgcttggaaatcagatgatatagttacactggtggaaattaataacggggaaagtgattttattttttttgcgttataa

SEQ ID NO: 92464 - DNA, 1074 bp, Escherichia coli UMEA 3240-1
gtgaaccttgctaatgcattaatacaggttccccaagatgaacgtgggggagagatagcgatacgaggatttgagtatcaaaggtgttgggcaatagacgaactgttaaatcgtcataaaaaaaatgaatcatatgtttttataccagagtatcatgatgatatattaatacttaattccccagtatcgccgaccattgcaacattcgcgcaagtcaaaacaagggatacacattggacaataactccgttaattaaatctgatggcgaaggtaaattatcttttataagtaaactgtttaagcataaatacgatttttcttcttatcaaactgatttgacatttattacaaatgcgctttttaaattttttgataagtatgagtttaacgctgatgaattgaaagaaaaagagaaaggtaaagttttaaatgctgtgcaggctcagttgccaggctttagcttatcagatttatcttctctgaaatttaaaacatccaatctcagtcttttggactatgacgcgcatcttctgggcaaaacagttgagtatttagaagatacaaacgcttcagaagttatcaatgcaatggcatttaaaagaactcttgttgagctttttgaaaagaaaactagagtttcatctaaagaaataaaaacatttaatgaattgatagagaaaaaaggcattagcaatgaactcatatctgaattaactttaaaaataaaagccctcaagactaactttcctgattgggagaatatgagtcttttattatccgtgttgcacaaagatgattttgaaaaactgactctgaaaattaaatatgagttatttttagttaatgtaaaaaatgcaagctcaattgaacatgatttttatcgatctctaaaacaatataattataaggggaagcttaatgctactaatatccccgattttattctaggctcgatctcttacgcatcaaagcaactagatgaatttgggcaattgattgatgatgattataaatatataatggcatgttgtgcagttattgaaatgatgtcagataatgaggcgaaaaaatga

SEQ ID NO: 92465 - DNA, 1665 bp, Escherichia coli UMEA 3240-1
atgaaccaagtaatatttaagagagtcgccatattgtcgctttctgagaaaaaagcattcacttttaatttctcagaaggtttgaacttcattcatggcacaaatgacacaggaaaatcaagtctaattaaaagtttatacttttgtcttggcggggatttgaggctggacgatagttggaagaagcaagagataattactaagctaacattatcttatcaagacaatattatagacttcattagaaaatcatcttattttgttgttactgtatataaagatggagtgaagaagtcagaaaaactttttagtaaagtgtctgaattaactggcgagattcagagtttatttgggtttaaccttctcctaacccttaaaaaaaataaggaaacaatccttgcgaacccagcatccttctttttcccattttatatcgatcaggatgatggttggagcaatgttctagagtcatttaatggcctgaaaatgtatgtggattggcagaaaaacgcacttcaatatcattcaggcatcaagccaaaagaatattatgctctaaacggtgaacaaaaaatattggcgctgaatattaatgagcttgaacaggaagctgagcttataaggaaaacaaaattcaggtttgaaaagtatttcgaaaacatcagatttgatattgatgttaatttttatattgataagatcgattactttattaagcaatgcgaagacttagagttacaagaaagaatctatagattacaggctttgaatttatactctaaaaggaacatagtatctgatctcattttcaatattgaaaatgaaagagtgaatgtttccagcgaagagaatggcgaagatgacatatcgttttcattaaataaatatgaaattaacaaaaataaggttagcttgttcagccaaaaagcaagtttatacgatgaaaagaataagttagatgagcaactctcgactataagaattaagttattagagcatagagagaagagtgagtatataaagtctatgcttagcaatgtacatgaaaaattctcaatcaaagagattattgactctgaagcttataagagtgctaccttagcatttgaacatcaattgtccgagatccaagaaagaataaatgcattagctttagaaaaggtcactattgatgctaaaattaaagcatttaataatataaagcgaactaaaactattaatgattattttcttttgatgcttaataaagcacaaactaagcttcatttaccgatctctgataaaggtggtgttataaagtataaggcattaacaactggtaaaactggtagtcgcagtcctagagcaatttttgcttatcattatgcattgttaatgacaattaaagaattttcgacactaccaatattgccaatagttatcgattcgccaaagcaacaagatttggatgatgagttgactgaacaactaattcaattttgtctggatgatctagcagagatatcgcaggttataattggcgcagtcaaaccagaaaaaaatatggtcggatatcattctgttaatttatttgaaaagtttagtctattaaagccagatacctttgatggagtatttcaagagattgtgccgcaattaaatgaaatgctagcacatttagattaa

SEQ ID NO: 92466 - DNA, 1080 bp, Escherichia coli EC096/10
gtggcgttatcagatgcgttaattacagtaaatcaagccgaacggggcggtgaaaacgcgttgagaggcttttcatatcaagcctcttgggggataaattatttacttgagaaacaaaaagaaaaggagaaatatttatttctatttgaatatcatgacgatattcttgtattgaattcatctgtttctccgactagtgctgagtttatccaagttaaaacaaaaaaagatggtaaatggacactcgcagcaatagtgaacgcaacaaaagctaaacctaaatcatttgttgcaaaactatatgaccatttctatcaattcgttggtcacgaaatttatatggttctgttatcgaatgctggattcgatttcttaaatgataataacgaaaaaggtagtgatcttaataatgagcataaggaaattataattagtaaggttcaagagcagctaaatactaaaaaagaagttcctcttgataaaataaaatttaaaacatctgatcttagtttgttagatcctaactcacatttatacgggaaagttgcagtttttttgaattcttactttggggatgatcatggtattaattcaacagcattcactaaattattaatcaataaatgtaatgagaaggttagtgttgcttctagtgatatcaaaacttttgaagatttagtactaaagaaaggtatatcttcagaatttgtaactgatttattatctggactcattgcaagcataaaaataacgccaaaatgggaacaggtttgtatgttgcttggtactttctcagatccttatgaggggattaaattacaatcagtttttacacgcatatcaataaaagtgctcaatgtcaattcaatatactatctttattttctggaatttcaatcggctctaaagattatagagcattatcgtgagatacctgttcgagacctcttctttacactcgaaaaaacaattgcagcggggggcggggatttctctttattaaatcaagaagagaaatttatgattgctatatatgcaattataaagttgacttttgaggatgtttcttatgaagaataa

SEQ ID NO: 92467 - DNA, 1659 bp, Escherichia coli EC096/10
atgaagaataacgttaaatttaaaaatataaaaatactctcattaagagacagaaaagctttttcttatgagttttcagaaggggttaacttcatatatggtacaaatgatgttggtaaatcaagcctgattaaaagtctttattacacattaggtggagatttaaggcttgatgatgcttggaaatcagatgatatagttacactggtggaaattaataacggggaaaatgattttatttttttacgttataaaaagattattggtgtctttgatttgaagaatgatgatctagtcgtgtataacacgatttcgtcattagcatctcgtgtttcaaatatatttggttttaaactggaattacataataaatatacgggtgctacgactcaggcaaaccctgcttgtttgtttgccccattctttattgatcaggatgaaggatggaaagcggtgataaattctttcgaaaacatgagtatgtactcagaatggcaaaaaaacattctttactatcactctggaattaagccaaaggaatattatacagttcaagggaaaatcaaagaaattaaagttaaaatttcagagttagatggttttgttaaggttctaaaaagaagcaaaagtaagattgatgaatcttttggcgtggttttatttgatgttgatttggatttttataaatcaaagttggaacgtatattaaatgaatattctaatttgaatttagttcagacagaatatagattgaatcttttgaggttatattctaggaagaatttccttgagagtgaactcaaagagataactgcgattattgataatgaatttgagatttcgaattttcgagatgataatgttgcttattcagtaaatgaatataattatataaaccatagagatgaaatgctcaaaaacattgctgttcttgcagatgagaaaagcaagattgaggaaaatattcctaaattgaatcaaaagctagaagagtcaagggctgcttcagaggcgttgcaggcgctgattttagaaactcaatcggaaataacgcttcatgatgttattaaatctgctgcataccatgaaattgaatctacttttatttcacagttagatgagttattcgttgagattggtcgaaaagaaggcgagttgacagagttacaagaagaattagaagtatacaatgataagaaaagaactgttaaaataaatgactgtttcaaagagtatttcgctaaagctcttaaagagcttggtgtcgaaaatacaaaggtaggtggccttagtagttataataatattactaagggcaagactggtagtcgaggtcctcgaggtatatttgcatttcactacgcgctgcttagtgttatgaaaagcaacgcttcagttgagaatatgcctatagtaatagactctccaaagcaacaagatttggatccagagcatacgcataagcttataaaactatgcttggatgggttttcccttacaaatcagattattattggaactgttggttatgagagtttcatggatggttttaatagcatcaaacttgaaaataaatatcatcttttaaatgatgaacattatgataatgtttattctcaattaatgccattgtttgaacgggtgatactttcaagatga

SEQ ID NO: 92468 - DNA, 1086 bp, Escherichia coli 1-392-07_S3_C3
atggggttagctgaaacattagttagtattccgcagtctgaaagaggcggtgagattgctcaacgtgggtttgactatcaaacttgctgggctttatctcaaatgctggaatatgaactagatgaaaagaactatgtgtttatcttcgaatatcatgatgatgttcttattcttgatgacgaagtttctccaacacaactcacatttgctcaagtaaaaacaagagagaaacactggactgcatccactcttagtaatagcaccaagaagaacccaatatctatcatcggtaagttatttattcatcaaaagaatttcgccgaatattcacccaagctcctttttgttactaatgcttctttcaatctatgtgaggaaaacggtggtaagtcttgttttggtgcaaatgaagtcaaagtggagtatcagacgagctttaagaaagcaatcaaagatcaagtaaagcttgatgactccagtatcgatctttctgttatgcgtttcgttcaatcctcattaagcctagatgaccacattatacatctaaaaggtaaactatgcgattttcttagcaagaagtttggcgatagcattagcctgagtgttaatgcattagcttctttgcttgaacaggcgtgtcgagaaaaatccaaggtaaaatccgcagatattattaattttactgaacttatctcacgaaagggtttctcatcagaagcattgaatggtgtgcttgattccttgaatgcaagtaatagtttaaagcctgattgggacaaagctagtcccctattcaatgatcttggcaaaacatcgcttcagctcattatcctgcaagccatgttctcacaagtttgcatcgaccttaaccaaaacaaaaaaaatccttcgactgtatatctagaatatgcaattagcctttacgatgaggcgagtgctcactcggatttgaaattatatctaactgaaaccatgtacaaaattgatgcactttgtccagattatgcattgactttaaagtcagggaagaaagaatgcatagttatttactcaataatccagaagctcttagagggtggtgaataa

SEQ ID NO: 92469 - DNA, 1653 bp, Escherichia coli 1-392-07_S3_C3
atgaaaagcatatactttaaaagtgctcatatattatcccttcgcgataagaaaggattctccttcaagttctcacctgatattaatatcattacaggtgagaacgacacaggtaagtctagctttattaagagcttatatcatacattaggtgctgatgttcgactggataaaaagtggaaagaagataactttgtttcaaaagttgttatttgtgttaataatcgtgactatgcgtttcttcgccacgaaaaacgtatttccattttcgatataacagcaggacaagagcatcacttagtgacctctagctctcgtgcagagattgcattagctgtgcgtgatgtctttgatttcaatttggagcttgtgactaaaactaatttggttcagggacaagcacaaccagcaagtctttatctcccttactatattgatcaagataacggttgggggaaagttttagattcatttagcagtttggctatgtatgaggactggcaaaaaaatatcttgaattttcatactggtgtaaaaccaaaggagtactatactttacaaggaaagattaatttaattgatatcgatcttgttgaaatccgaacgacgttaaaagctctaaagagagctaaaaagcgattcgaagagtcatttggaagagtacttttcgatgtggatgtaaaatattatgaagagctgctggaacgtttccttcgtaagtgccaagacttacatcaagaagaaacagaatacagaattaagctcataaaaatattatctctacgagatcaattagtaacagaaatagaggaatcaaaaagacagctcgatgaaaatgatatagattctttgctaccatcggcaggcttagaagcaagatatgtagtacttgagaataaagaaaagctattgcaaatcataccaaagttgtatgaggaaaaatctgtatatgatgatcaactctctaaaattaaagaagatttgaaacaggctataagcttaagctcagaactcaaaaacatgcttctggaagtcaaagagcaactgactcttcaagacgttattaagtctcaagcaagtaagcaggttgaggtaactttcgatgagcaaattaacgaattactgctaaaaataggcgaattggatgttgctagaactcagctttcaaaagaaatagcaaagttcgaagataaaaagcgagcaaaagaaatcaatgataagtttaaagagtcactgaagtttgcgcaaactgagttaggtatcaaagatcctaaagttggaactattcttcaatatggtccgatttctaagagcgaaacaggcagccgtgctccaagatcaatattggcttatcactatgctcttctaaaaacaatagaagataaatcgacaagtcctatgcttccagtagtaattgactcgcctaaacaacaagatccagatccgcgtacaacaaaaaagttattcgatttatgtattaatggtttatcaactaatagccagctaattatcggctcagtttcatttgaaagagaaacgaatcagtttaaaacacttattatgactgaaaaatacagtctgctaaaatcagagctttacaatcaggtttatcaagagattatgcctctttatgaacgagctgcgttatcataa

SEQ ID NO: 92470 - DNA, 1086 bp, Escherichia coli 3-105-05_S1_C1
atggggttagctgaaacattagttagtattccgcagtctgaaagaggcggtgagattgctcaacgtgggtttgactatcaaacttgctgggctttatctcaaatgctggaatatgaactagatgaaaagaactatgtgtttatcttcgaatatcatgatgatgttcttattcttgatgacgaagtttctccaacacaactcacatttgctcaagtaaaaacaagagagaaacactggactgcatccactcttagtaatagcaccaagaagaacccaatatctatcatcggtaagttatttattcatcaaaagaatttcgccgaatattcacccaagctcctttttgttactaatgcttctttcaatctatgtgaggaaaacggtggtaagtcttgttttggtgcaaatgaagtcaaagtggagtatcagacgagctttaagaaagcaatcaaagatcaagtaaagcttgatgactccagtatcgatctttctgttatgcgtttcgttcaatcctcattaagcctagatgaccacattacacatctaaaaggtaaactatgcgattttcttagcaagaagtttggcgatagcattagcctgagtgttaatgcattagcttctttgcttgaacaggcgtgtcgagaaaaatccaaggtaaaatccgcagatattattaattttactgaacttatctcacgaaagggtttctcatcagaagcattgaatggtgtgcttgattccttgaatgcaagtaatagtttaaagcctgattgggacaaagctagtcccctattcaatgatcttggcaaaacatcgcttcagctcattatcctgcaagccatgttctcacaagtttgcatcgaccttaaccaaaacaaaaaaaatccttcgactgtatatctagaatatgcaattagcctttacgatgaggcgagtgctcactcggatttgaaattatatctaactgaaaccatgtacaaaattgatgcactttgtccagattatgcattgactttaaagtcagggaagaaagaatgcatagttatttactcaataatccagaagctcttagagggtggtgaataa

SEQ ID NO: 92471 - DNA, 1653 bp, Escherichia coli 3-105-05_S1_C1; identical to SEQ ID NO: 92469

SEQ ID NO: 92472 - DNA, 1086 bp, Escherichia coli 3-475-03_S4_C2
atggggttagctgaaacattagttagtattccgcagtctgaaagaggcggtgagattgctcaacgtgggtttgactatcaaacttgctgggctttatctcaaatgctggaatatgaactagatgaaaagaactatgtgtttatcttcgaatatcatgatgatgttcttattcttgatgacgaagtttctccaacacaactcacatttgctcaagtaaaaacaagagagaaacactggactgcatccactcttagtaatagcaccaagaagaacccaatatctatcatcggtaagttatttattcatcaaaagaatttcgccgaatattcacccaagctcctttttgttactaatgcttctttcaatctatgtgaggaaaacggtggtaagtcttgttttggtgcaaatgaagtcaaagtggagtatcagacgagctttaagaaagcaatcaaagatcaagtaaagcttgatgactccagtatcgatctttctgttatgcgtttcgttcaatcctcattaagcctagatgaccacattacacatctaaaaggtaaactatgcgattttcttagcaagaagtttggcgatagcattagcctgagtgttaatgcattagcttctttgcttgaacagacgtgtcgagaaaaatccaaggtaaaatccgcagatattattaattttactgaacttatctcacgaaagggtttctcatcagaagcattgaatggtgtgcttgattccttgaatgcaagtaatagtttaaagcctgattgggacaaagctagtcccctattcaatgatcttggcaaaacatcgcttcagctcattatcctgcaagccatgttctcacaagtttgcatcgaccttaaccaaaacaaaaaaaatccttcgactgtatatctagaatatgcaattagcctttacgatgaggcgagtgctcactcggatttgaaattatatctaactgaaaccatgtacaaaattgatgcactttgtccagattatgcattgactttaaagtcagggaagaaagaatgcatagttatttactcaataatccagaagctcttagagggtggtgaataa

SEQ ID NO: 92473 - DNA, 1653 bp, Escherichia coli 3-475-03_S4_C2; identical to SEQ ID NO: 92469

SEQ ID NO: 92474 - DNA, 1086 bp, Escherichia coli 1-392-07_S3_C1; identical to SEQ ID NO: 92468

SEQ ID NO: 92475 - DNA, 1653 bp, Escherichia coli 1-392-07_S3_C1; identical to SEQ ID NO: 92469

SEQ ID NO: 92476 - DNA, 1086 bp, Escherichia coli 1-392-07_S3_C2; identical to SEQ ID NO: 92468

SEQ ID NO: 92477 - DNA, 1653 bp, Escherichia coli 1-392-07_S3_C2; identical to SEQ ID NO: 92469

SEQ ID NO: 92478 - DNA, 1086 bp, Escherichia coli 2-474-04_S1_C1
atggggttagctgaaacattagttagtattccgcagtctgaaagaggcggtgagattgctcaacgtgggtttgactatcaaacttgctgggctttatctcaaatgctggaatatgaactagatgaaaagaactatgtgtttatcttcgaatatcatgatgatgttcttattcttgatgacgaagtttctccaacacaactcacatttgctcaagtaaaaacaagagagaaacactggactgcatccactcttagtaatagcaccaagaagaaccccatatctatcatcggtaagttatttattcatcaaaagaatttcgccgaatattcacccaagctcctttttgttactaatgcttctttcaatctatgtgaggaaaacggtggtaagtcttgttttggtgcaaatgaagtcaaagtggagtatcagacgagctttaagaaagcaatcaaagatcaagtaaagcttgatgactccagtatcgatctttctgttatgcgtttcgttcaatcctcattaagcctagatgaccacattacacatctaaaaggtaaactatgcgatttccttagcaagaagtttggcgatagcattagcctgagtgttaatgcattagcttctttgcttgaacaggcgtgtcgagaaaaatccaaggtaaaatccgcagatattattaattttcctgaacttatctcacgaaagggtttctcatcagaagcattgaatggtgtgcttgattccttgaatgcaagtaatagtttaaagcctgattgggacaaagctagtcccctattcaatgatcttggcaaaacatcgcttcagctcattatcctgcaagccatgttctcacaagtttgcatcgaccttaaccaaaacaaaaaaaatccttcgactgtatatctagaatatgcaattagcctttacgatgaggcgagtgctcactcggatttgaaattatatctaactgaaaccatgtacaaaattgatgcactttgtccagattatgcattgactttaaagtcagggaagaaagaatgcatagttatttactcaataatccagaagctcttagagggaggtgaataa

SEQ ID NO: 92479 - DNA, 1653 bp, Escherichia coli 2-474-04_S1_C1
atgaaaagcatatactttaaaagtgctcatatattatcccttcgcgataagaaaggattctccttcaagttctcacctgatattaatatcattacaggtgagaacgacacaggtaagtctagctttattaagagcttatatcatacattaggtgctgatgttcgactggataaaaagtggaaagaagataactttgtttcaaaagttgttatttgtgttaataatcgtgactatgcgtttcttcgccacgaaaaacgtatttccattttcgatataacagcaggacaagagcatcacttagtgacctctagctctcgtgcagagattgcattagctgtgcgtgatgtctttgatttcaatttggagcttgtgactaaaactaatttggttcagggacaagcacaaccagcaagtctttatctcccttactatattgatcaagataacggttgggggaaggttttagattcatttagcagtttggctatgtatgaggactggcaaaaaaatatcttgaattttcatactggtgtaaaaccaaaggagtactatactttacaaggaaagattaatttaattgatatcgatcttgttgaaatccgaacgacgttaaaagctctaaagagagctaaaaagcgattcgaagagtcatttggaagagtacttttcgatgtggatgtaaaatattatgaagagctgctggaacgtttccttcgtaagtgccaagacttacatcaagaagaaacagaatacagaattaagctcataaaaatattatctctacgagatgaattagtaacagaaatagaggaatcaaaaagacagctcgatgaaaatgatatagattctttgctaccatcggcaggcttagaagcgagatatgtagtacttgagaataaagaaaagctattgcaaatcataccaaagttgtatgaggaaaaatctgtatatgatgatcaactctctaaaattaaagaagatttgaaacaggctataagcttaagctcagaactcaaaaacatgcttctggaagtcaaagagcaactgactcttcaagacgttattaagtctcaagcaagtaagcaggttgaggtaactttcgatgagcaaattaacgaattactgctaaaaataggcgaattggatgttgctagaactcagctttcaaaagaaatagcaaagttcgaagataaaaagcgagcaaaagaaatcaatgataagtttaaagagtcactgaagtttgcgcaaactgagttaggtatcaaagatcctaaagttggaactattcttcaatatggtccgatttctaagagcgaaacaggcagccgtgctccaaggtcaatattggcttatcactatgctcttctaaaaacaatagaagataaatcgacaagtcctatgcttccagtagtaattgactcgcctaaacaacaagatccagatccgcgcacaacaaaaaagttattcgatttatgtattaatggtttatcaactaatagccagctaattatcggctcagtttcatttgaaagagaaacgaatcagtttaaaacacttattatgactgaaaaatacagtctgctaaaatcagagctttacaatcaggtttatcaagagattatgcctctttatgaacgagctgcgttatcataa

SEQ ID NO: 92480 - DNA, 1086 bp, Escherichia coli 3-105-05_S1_C3; identical to SEQ ID NO: 92470

SEQ ID NO: 92481 - DNA, 1653 bp, Escherichia coli 3-105-05_S1_C3; identical to SEQ ID NO: 92469

SEQ ID NO: 92482 - DNA, 1110 bp, Escherichia coli
gtggctaaaaataaagcggcaaacgccggggttgatgcgttaacaggttttgagtttcaaagaaactgtgcattatatcttttgttagataatttcaattcttttatcaataaagagttctttatttgtatcgaacatcacgatgattttctattttgttataaaactgattgcttaagttatataaacgagatacatgcctatcaagcaaagaaacttagcgggaaaatatggactatcgattctaggttttctgagatggtatctaaaatactattggtgggcgaaaacttaagaaatgatgcttttgaaaaaagtgaagattataaacaccagctaacatttatatcaaatacagaaatagaattaaaatactcaccgtcaaaggcgttaaaaaaagaaggtattactgagcagatattaaggattaatgagcaaaactctatctgtgcttatgatgaattacataaaaacattcagaataaaattgaagagaaagttacagatatttgtaatgaagaatcttctgttttccatcgtaaggaactaagtaacctaaaaattcagtgggtagattttccaagaacagctgcaaaacaaaaagaatcgcttattggacttatgtctagaaagttttctcatatagctgactcgaaagcagccatcgaggtaatacttgctctatttagaaatgtggaaactgtatataatcaaggacaggaaatatgtctactcgatccaacaaaaagggttgaaggcgaagaagttaagaaagttatgaatataattgattcacagcaaaaggcattcgactattggcgtgacgaagcacagcaattctcaattaaattcagaataccacttagcatacagaaaaatcatgaaaactatatacttaactcttttgaactactcaaggatatgagtaattacgattatcaaatcattaaagactttgttagaaataatgattacacaactcaatatttttctcttcaagacgcattaactgcatatgttgataatgttagaaaatctcattctataaacctagataatattgatacattttttgcagttctgtgttcatacgttgagtgctacgattaa

SEQ ID NO: 92483 - DNA, 1764 bp, Escherichia coli
atgaagacaattataaagtttgatagattgtttgttgtctctgaaagtcataatttatatttcgaccaaaagttttcaaataaaataaacataataagtgggtgtaatacctcaggtaaaagtactttaatacagagtattttatttacctttggaattaacgatgttaaagatggcttgagcgaaattattcgatacaaccctacgttcagattggatttcagcatcactaaaggaggcgtagataaaaaatatataatagtaagagagcttggtagcatatatttaaaagaggatgggggaaatgtttttagttttcatggaattgactctgatggtcgagttgaacatgtgaagcttaaggagatgttatctcaattatttgattttaacatgcttttagaacagaagggtgagctaaaaaaagcatcgatagaatgcatgttcctgccttattatatttctcaatctgtagggtgggtttatttaagagagtcattctctaatcttggtttttataaagactttaaagatacgtatcttgattattatcttggcatagaaaattcttttgataaagaatatttttataaattaacaaaagagcgggcacaacttcagtcgaagatctcctcattgaataaatatagcgccgagcctcactttgttgtttctaaattactggatgaagagtttggtgatgaggctcagaagtatatagatggttatataaaattagtagcatcattagacgaagaacgtgatgtatatactggtttgtgtaataagttatccttaactaaaaatcatgtcaagatactaagaagaactaaaagaaatattaaaaaccaaaactataacaatattgatcgttgtcctgcatgcacgcaaatacttccttattccttagaagggttatatggttattatcaaaacatcaatgatactgataaactatcggagcaaataaataataaaatacaaaaaatacagtctgacattaatagttcacttgcgaagattaaaaagttagaaattgatatatcttcaaagtattcatattttcttgagaaaaaatcacaaaatttatctgttaacacatggatcgataataaagcaaacatacgtctgttaggcaatattcatgaagagatagaagaatatacaaaaaggtctgatgaaattaaaggattaattgatgggatgggagaggagcagtctctttttgtcgagcggtttaataaagaaaaagatttcaaggaaatatttaaaaaatatcttaatgatatgcagttgttcaatgtaacagaacctagatatacagatctttataaaataaattcatttccttttcaaggggttgaacttcataaaactgtaatgtcatatcattttgcattaaattctttaataagaaaaacagacaatatacatcgacttccatttatgcttgacgcaattcttaaggaagatatcgatgacagaaattttgatctcatactgtcgtttgtgggaaaaaatcttccgactgatactcaatcatttatatcaatgtctgagtatgctgaagataacctcttgaaagatggtaaagagataagtgcattccgaagagccaaggttgaagatattaaaaatcgatacttccctgatggtacgaatttattctttattggtgatgggaagcatgagagaacatttttatcaaaacctttggatttaaacctcgatatttttgtcgatacttgtcggcttactgaatga

SEQ ID NO: 92484 - DNA, 1110 bp, Escherichia coli; identical to SEQ ID NO: 92482

SEQ ID NO: 92485 - DNA, 1764 bp, Escherichia coli; identical to SEQ ID NO: 92483

SEQ ID NO: 92486 - DNA, 1086 bp, Escherichia coli
atggggttagctgaaacattagttagtattccgcagtctgaaagaggcggtgagattgctcaacgtgggtttgactatcaaacttgctgggctttatctcaaatgctggaatatgaactagatgaaaagaactatgtgtttatcttcgaatatcatgatgatgttcttattcttgatgacgaagtttctccaacacaactcacatttgctcaagtaaaaacaagagagaaacactggactgcatccactcttagtaatagcaccaagaagaacccaatatctatcatcggtaagttatttattcatcaaaagaatttcgccgaatattcacccaagctcctttttgttactaatgcttctttcaatctatgtgaggaaaacggtggtaagtcttgttttggtgcaaatgaagtcaaagtggagtatcagacgagctttaagaaagcaatcaaagatcaagtaaagcttgatgactccagtatcgatctttctgttatgcgtttcgttcaatcctcattaagcctagatgaccacattacacatctaaaaggtaaactatgcgattttcttagcaagaagtatggcgatagcattagcctgagtgttaatgcattagcttctttgcttgaacaggcgtgtcgagaaaaatccaaggtaaaatccgcagatattattaattttactgaacttatctcacgaaagggtttctcatcagaagcattgaatggtgtgcttgattccttgaatgcaagtaatagtttaaagcctgattgggacaaagctagtcccctattcaatgatcttggcaaaacatcgcttcagctcattatcctgcaagccatgttctcacaagtttgcatcgaccttaaccaaaacaaaaaaaatccttcgactgtatatctagaatatgcaattagcctttacgatgaggcgagtgctcactcggatttgaaattatatctaactgaaaccatgtacaaaattgatgcactttgtccagattatgcattgactttaaagtcagggaagaaagaatgcatagttatttactcaataatccagaagctcttagagggtggtgaataa

SEQ ID NO: 92487 - DNA, 1653 bp, Escherichia coli
atgaaaagcatatactttaaaagtgctcatatattatcccttcgcgataagaaaggattctccttcaagttctcacctgatattaatatcattacaggtgagaacgacacaggtaagtctagctttattaagagcttatatcatacattaggtgctgatgttcgactggataaaaagtggaaagaagataactttgtttcaaaagttgttatttgtgttaataatcgtgactatgcgtttcttcgccacgaaaaacgaatttccattttcgatataacagcaggacaagagcatcacttagtgacctctagctctcgtgcagagattgcattagctgtgcgtgatgtctttgatttcaatttggagcttgtgactaaaactaatttggttcagggacaagcacaaccagcaagtctttatctcccttactatattgatcaagataacggttgggggaaagttttagattcatttagcagtttggctatgtatgaggactggcaaaaaaatatcttgaattttcatactggtgtaaaaccaaaggagtactatactttacaaggaaagattaatttaattgatatcgatcttgttgaaatccgaacgacgttaaaagctctaaagagagctaaaaagcgattcgaagagtcatttggaagagtacttttcgatgtggatgtaaaatattatgaagagctgctggaacgtttccttcgtaagtgccaagacttacatcaagaagaaacagaatacagaattaagctcataaaaatattatctctacgagatcaattagtaacagaaatagaggaatcaaaaagacagctcgatgaaaatgatatagattctttgctaccatcggcaggcttagaagcaagatatgtagtacttgagaataaagaaaagctattgcaaatcataccaaagttgtatgaggaaaaatctgtatatgatgatcaactctctaaaattaaagaagatttgaaacaggctataagcttaagctcagaactcaaaaacatgcttctggaagtcaaagagcaactgactcttcaagacgttattaagtctcaagcaagtaagcaggttgaggtaactttcgatgagcaaattaacgaattactgctaaaaataggcgaattggatgttgctagaactcagctttcaaaagaaatagcaaagttcgaagataaaaagcgagcaaaagaaatcaatgataagtttaaagagtcactgaagtttgcgcaaactgagttaggtatcaaagatcctaaagttggaactattcttcaatatggtccgatttctaagagcgaaacaggcagccgtgctccaagatcaatattggcttatcactatgctcttctaaaaacaatagaagataaatcgacaagtcctatgcttccagtagtaattgactcgcctaaacaacaagatccagatccgcgtacaacaaaaaagttattcgatttatgtattaatggtttatcaactaatagccagctaattatcggctcagtttcatttgaaagagaaacgaatcagtttaaaacacttattatgactgaaaaatacagtctgctaaaatcagagctttacaatcaggtttatcaagagattatgcctctttatgaacgagctgcgttatcataa

SEQ ID NO: 92488 - DNA, 1080 bp, Escherichia coli
gtggcgttatcagatgcgttaattacagtaaatcaagccgaacggggcggtgaaaacgcgttgagaggcttttcatatcaagcctcttgggggataaattatttacttgagaaacaaaaagaaaaggagaaatatttatttctatttgaatatcatgacgatattcttgtattgaattcatctgtttctccgactagtgctgagtttatccaagttaaaacaaaaaaagatggtaaatggacactcgcagcaatagtgaacgcaacaaaagctaaacctaaatcatttgttgcaaaactatatgaccatttctatcaattcgttggtcacgaaatttatatggttctgttatcgaatgctggattcgatttcttaaatgataataacgaaaaaggtagtgatcttaataatgagcataaggaaattataattagtaaggttcaagagcagctaaatactaaaaaagaagttcctcttgataaaataaaatttaaaacatctgatcttagtttgttagatcctaactcacatttatacgggaaagttgcagtttttttgaattcttactttggggatgatcatggtattaattcaacagcattcactaaattattaatcaataagtgtaatgagaaggttagtgttgcttctagtgatatcaaaacttttgaagatttagtactaaagaaaggtatatcttcagaatttgtaactgatttattatctggactcattgcaagcataaaaataacgccaaaatgggaacaggtttgtatgttgcttggtactttctcagatccttatgaggggattaaattacaatcagtttttacacgcatatcaataaaagtgctcaatgtcaattcaatatactatctttattttctggaatttcaatcggctctaaagagtatagagcattatcgtgagatacctgttcgagacctcttctttacactcgaaaaaacaattgcagcgggggacggggatttctctttattaaatcaagaagagaaatttatgattgctatatatgcaattataaagttgacttttgaggatgtttcttatgaagaataa

SEQ ID NO: 92489 - DNA, 1659 bp, Escherichia coli
atgaagaataacgttaaatttaaaaatataaaaatactctcattaagagacagaaaagctttttcttatgagttttcagaaggggttaacttcatatatggtacaaatgatgttggtaaatcaagcctgattaaaagtctttattacacattaggtggagatttaaggcttgatgatgcttggaaatcagatgatatagttacactggtggaaattaataacggggaaaatgattttatttttttgcgttataaaaagattattggtgtctttgatttgaagaatgatgatctagtcgtgtataacacgatttcgtcattagcatctcgtgtttcaaatatatttggttttaaactggaattacataataaatatacgggtgctacgactcaggcaaaccctgcttgtttgtttgccccattctttattgatcaggatgaaggatggaaagcggtgataaattctttcgaaaacatgagtatgtactcagaatggcaaaaaaacattctttactatcactctggaattaagccaaaggaatattatacagttcaagggaaaatcaaagaaattaaagttaaaatttcagagttagatggttttgttaaggttctaaaaagaagcaaaagtaagattgatgaatcttttggcgtggttttatttgatgtcgatttggatttttataaatcaaagttggaacgtatattaaatgaatattctaatttaaatttagttcagacagaatatagattgaatcttttgaggttatattctaggaagaatttccttgagagtgaactcaaagagataactgcgattattgataatgaatttgagatttcgaattttcgagatgataatgttgcttattcagtaaatgaatataattatataaaccatagagatgaaatgctcaaaaacattgctgttcttgcagatgagaaaagcaagattgaggaaaatattcctaaattgaatcaaaagctagaagagtcaagggctgcttcagaggcgttgcaggcgctgattttagaaactcaatcggaaataacgcttcatgatgttattaaatctgccgcataccatgaaattgaatctacttttatttcacagttagatgagttattcgttgagattggtcgaaaagaaggcgagttgacagaattacaagaagaattagaagtatacaatgataagaaaagaactgttaaaataaatgactgtttcaaagagtatttcgctaaagctcttaaagagcttggtgtcgaaaatacaaaggtaggtggccttagtagttataataatattactaagggtaagactggtagtcgaggtcctcgaggtatatttgcatttcactacgcgctgcttagtgttatgaaaagcaactcttcagttgagaatatgcctatagtaatagactctccaaagcaacaagatttggatccagagcatacgcataagcttataaaactatgcttggatgggttttcccttacaaatcagattattattggaactgttggttatgagagtttcatggatggttttaatagcatcaaacttgaaaataaatatcatcttttaaatgatgaacattatgataatgtttattctcaattaatgccattgtttgaacgggtgatactttcaagatga

SEQ ID NO: 92490 - DNA, 1086 bp, Escherichia coli
atggaaagtaatattttaggtcatgctcaaagagaaacatcaggagcaaccacattcggaaaatatgacttccaatatcattgggcgttatgcagaataattgaaaagcataaagaaaattctgactatgcattattaattgaatatcatgaggatgttgttatagcagactcattatatggaagttcagcaaattttgaattcttccaggtaaagaacactggaaatcctttcacttctgacgctttaactaaacgagaaaaaggagctaagggaccgaagaactccattctaggtaagttattaagctcatgcattggtactgattatgaagatcgtattacggaaataggtcttgtatcttcaagtggcttctcatttgatcaaaaagataatagattaaaattagacattataacttcaggtgatcttagcgtagaatgtctctcggggctaactgagaaattaaaagctgaacttgggatagttatttttccagaaaatctaaaatttatcgtccccaaaataaagcttgagaatcaagaagaatttgtcattgccagatttgctgaattagttaatgatatattcccaaatagtcattgcaatgccgttaatatttatagggcagtcatcgatgagattcatcgcaaaggacgtaatacttacgactttactgtttgggaaaaaatggtagaggataagtctctcacatctcataaggttaaggatgtcatagcagttaatacaacaagcccaaaatttgaagactttgagagagactttgaatatttagccaaaaacgatatgaaatggaacacgctaacttatcgaaagattaataaaaaaataaagcaacttttcttacgtcgagtcggacacgcttcagcttttgacattaatataatgagaatagctcaacaggcactcagtagcgttccagaagaagagtttacagaaaccagtgattacattgagtcagctattgtggaagctaaaaaactgaacattgaaagtcaaatccctgaacatgacgatatactttgtgaaataatctattgttttttaaaggtgatgcatgaataa

SEQ ID NO: 92491 - DNA, 1734 bp, Escherichia coli
atgagaaacttgacatttcaacgattagttctgatatcagattcgaaaagacttgcgaatcagttcacgtttccgaaaagattgaatctaattacaggaagagataatagtataggcaagtccactctagccaagaacttattgtggtctctaggatgtgatcctgttatggatgaggaatggaaatcaaatgatattaaagcgatattatatttcactataaataacaaagaatattttacttgtcgaggaagccactcaataattttgggagctataggtggtgaagcgagaagatacactcatataactggtgattattcaaaagacctatctgagcttgttgattttaaaatgaagcttcctaatcgtaatgatggaaacttagatactcctcctccagcatattactttttaccattctatatcgatcagataaaaagctggagttcaccttgggattcatttgaaaacttaggtcaatatgccaactggaaaaaaccgttaatcaagtattttactggttatctgaaaccagaacattttgacattgaagaaaatatttatgaatacaatgagttcaagaaggaatcagctgcaaaaatagagaaattccaaagcgctgttgaaattatagttgataattcagctgattccccaatagcattagacaatgagaatttcagtagaatccaagaagagataaacactgagcttctcgaattgatcgactatcaaacgaggctttatgatgctcaagcttcgatcacctcaaatatttatgatcttgaaaggcaatatgagttagctactagttcggcaaacgaactcgaagaggattataaatttgcggtagaatccatacctacggataatttagaatgtccattatgtggtactcttcatgataattcattgcttaacagagcgctgcttctttcagaaaaaaattcgctgcttgatgaggcaaactctatagcatctaaattagtcgaactgaaatcatcattagctgaattaaatgagaatgctcagtttgccattaatgaaattgaaaggataaataaaaaatatgttacagatgataatgcaaataaaaaagatattattgcacaggtgataggtactatatccaccgaaaatgtctccagaaacattcaagtaaaaattgataatgaagagcacaaaataagcaacgccaccagttctatccgggaattaaaaaaagatcagaaaaaacttctttcaaccaaagaaaaggaagagttgaactcgtcctttatatccaaactgttggttaacattgaagcgctagattcaacaggaataaatcttagaaaagtaaaatcacctactgactacaaacagttgcttggtggcggtgctgctgaggctgcgaggggattgcttgcttatcagatctccgtactgcaacaaatacatagtgctaaaacttgcatagtgcctcctttcgtcattgatacgcctaaccaacaagaacaggcaggacatcgttatgaaacagtcattaaagaattaatgcgcagtatccctcaggattatcagataatattatgcgcaatggagaataatgtgttaaatgaattcaaacaggatgctaatgttattgagctaaactccaataggcttttaattgcttcgcaatataatttgctgcgagctgagtataaattaattcaagcgaaaatcgtaggtctagatgaggaggagtaa

SEQ ID NO: 92492 - DNA, 1086 bp, Escherichia coli; identical to SEQ ID NO: 92490

SEQ ID NO: 92493 - DNA, 1734 bp, Escherichia coli; identical to SEQ ID NO: 92491

SEQ ID NO: 92494 - DNA, 1086 bp, Escherichia coli; identical to SEQ ID NO: 92490

SEQ ID NO: 92495 - DNA, 1734 bp, Escherichia coli; identical to SEQ ID NO: 92491

SEQ ID NO: 92496 - DNA, 1086 bp, Escherichia coli; identical to SEQ ID NO: 92490

SEQ ID NO: 92497 - DNA, 1734 bp, Escherichia coli; identical to SEQ ID NO: 92491

SEQ ID NO: 92498 - DNA, 1086 bp, Escherichia coli; identical to SEQ ID NO: 92490

SEQ ID NO: 92499 - DNA, 1734 bp, Escherichia coli; identical to SEQ ID NO: 92491

SEQ ID NO: 92500 - DNA, 1086 bp, Escherichia coli; identical to SEQ ID NO: 92490

SEQ ID NO: 92501 - DNA, 1734 bp, Escherichia coli; identical to SEQ ID NO: 92491

SEQ ID NO: 92502 - DNA, 1086 bp, Escherichia coli; identical to SEQ ID NO: 92490

SEQ ID NO: 92503 - DNA, 1734 bp, Escherichia coli; identical to SEQ ID NO: 92491

SEQ ID NO: 92504 - DNA, 1086 bp, Escherichia coli; identical to SEQ ID NO: 92490

SEQ ID NO: 92505 - DNA, 1734 bp, Escherichia coli; identical to SEQ ID NO: 92491

SEQ ID NO: 92506 - DNA, 1086 bp, Escherichia coli; identical to SEQ ID NO: 92490

SEQ ID NO: 92507 - DNA, 978 bp, Escherichia coli
atgagaaacttgacatttcaacgattagttctgatatcagattcgaaaagacttgcgaatcagttcacgtttccgaaaagattgaatctaattacaggaagagataatagtataggcaagtccactctagccaagaacttattgtggtctctaggatgtgatcctgttatggatgaggaatggaaatcaaatgatattaaagcgatattatatttcactataaataacaaagaatattttacttgtcgaggaagccactcaataattttgggagctataggtggtgaagcgagaagatacactcatataactggtgattattcaaaagacctatctgagcttgttgattttaaaatgaagcttcctaatcgtaatgatggaaacttagatactcctcctccagcatattactttttaccattctatatcgatcagataaaaagctggagttcaccttgggattcatttgaaaacttaggtcaatatgccaactggaaaaaaccgttaatcaagtattttactggttatctgaaaccagaacattttgacattgaagaaaatatttatgaatacaatgagttcaagaaggaatcagctgcaaaaatagagaaattccaaagcgctgttgaaattatagttgataattcagctgattccccaatagcattagacaatgagaatttcagtagaatccaagaagagataaacactgagcttctcgaattgatcgactatcaaacgaggctttatgatgctcaagcttcgatcacctcaaatatttatgatcttgaaaggcaatatgagttagctactagttcggcaaacgaactcgaagaggattataaatttgcggtagaatccatacctacggataatttagaatgtccattatgtggtactcttcatgataattcattgcttaacagagcgctgcttctttcagaaaaaattcgctgcttgatgaggcaaactctatag

SEQ ID NO: 92508 - DNA, 1185 bp, Escherichia coli; identical to SEQ ID NO: 92458

SEQ ID NO: 92509 - DNA, 1752 bp, Escherichia coli
atgaaacttgtaagtataaaaattaaaggtaggggaattgtagggcttgaatccgacgaacttgtttttggtaaaaatattactgaattttacggacctaatgggtgtggtaaaacgccattactgcaatcaatctcttattgccttggatacccatgcaaatttagagatgatatttataaattatgcaaatctgccacccttacttttacgatagctaatgatatttttaaagccactagagactttgaacataccgacttcattttgtccttagaaagcaataaagagatattgaaattttataatgaagctgattattccaagtacattttcgaaaaactatctttaaattatccatcacttcttacaactcagaataaacagtcttatccttacttatcaactgttcttcctatattttatcttgatcaagacttaggttactcaaaattttattactcgcctagaaattttattaaagatcagttttctgaaatgcttagaatagtattctctttgccagaaaaacattcttttgatgctaaaaagaaaaatattaatctcacagaagaaattaaatatttagataattcattagcagtacaaagaagaaatattgaaatagctaaagatgcccataaagataaaaacatcgaatcaatcgatagttcgattaataatttgaaagacgaacttactgaattgaaaaatagcaaatcattgaaaaatgattctcttgtgagcatagatgcagttataagaaatcaaaaagaaaacctaaacactctcaagtcagaattaaaattcatggaaagaagagagtcatcattattacaaataatgaaagaaattaacactgaaataaatactctcaatctaaatgaggaagctaaaagaatatttcgctcttttgaggaaatttgcccttccctagattgcaaaatgtttacaagaagctctgaaagctatgcaaaacatcttttatatcttaaagatcaaattaaggatattgaaagaagtttaaaattagatagtgatcggcatgacgcgatagaacaggaaataaaacacacgagtaagaccatcgaagacctgaacactatgagaacaaatatcattgaagaggaagatatatcttcagtaattgacgctatttctgaaataacgtcaatgttatttcagttacaacttgaaaaaaatgaattaaataaaatagcgttattagaggcaaagtatgttgaaatgcttaataaacgcgagcacgctttagacgaattagatggtctcgataaaaatagacagacaatccctagattagcaaagattaagacaaccttacgagataaattcatattctggttaaaagtgttgaaaacccctaacattgatttcaatattacatttgaaaatgatttcagtccaatcatgggctatgaaaccttagagcaattaaaaggcagcactaaatcacgagctatattagcttatagaagtgcattgatagaaagcatgatagaattaaattgcaagtcttttatgtttgctatatttgatactcctaagcaacatgaaatacatcacgaagacatagataatttcattatggctttaaagaaattatctaaaaaacataattttcagtttatcttctcgtcaacagaatacaaatataacggtgatgatgatgatatcattttaactcctaagtatccaggagagcagcatgacatgttcctaagaaggtattag

SEQ ID NO: 92510 - DNA, 1092 bp, Escherichia coli; identical to SEQ ID NO: 92454

SEQ ID NO: 92511 - DNA, 1668 bp, Escherichia coli
atgagaaaattaattttagaaaaaatagtaataatatctcattcaacaaaatccgcgaggcaattcgagttcggaaggaatctgactctaataacagctaatgatggtaatagcgttggcaaatcgacattagcaaaaatgattttttggtcatttggttgcgagccttttttttccaaagtttggaaaaaacttgattgctcatcgattattatgtttagtattgatgatgagccattcgctcttcatcgttacaaaaatcaaatgagtctacgcaagaatggtcagctaataaaggcttatgataaaattactggtgctttttcagagaaatttgcagagttagtgaagtttgatgtcttgttaccgaagaaaaacacttttaatttagaagttcctcctcctgcatattattttttaccattctatattgaccagaaacggacatgggtgaaagcatgggattcttttgcaaatttgcaacagtatagtaagtgggcaaagcctgtgatatcttttcatagtggtcttatttctaaggaacattttattgttgaagaagatatctatgaagttaaggcgcaggttaatgaagttgaaagtaatatcaatgaattaactaatgctgttgcgatattaaaaagtaatattactcagcaattttatatagccaactctgaagacttggtaattgagatattgaaatatgaagaattgatcaaacttaatttggaagaatcttctaatttaaaaattgatattattggacttgattcgcaagtaaaacttgctgagtccataattagtgaattagacaaagattatattttttctgttgagaatatgaatgaaggtagtattgagtgtcctacgtgtggaacaattcatgaaaattcaatagctcacagaagtagcattcttattgataaagaaactgccgaaagacaattatctttattgttgaatgaaaaaaaacaccttcaagataagttgaaaagtttaaatgaagctcttttagagcttaaagaaaagttaaaatatgtacagatagcatttgaaaaaagtaattcaaaggagttttcagaatttacaactaataatgtcgataaacaggttgagatcattgtcggaaataaaaaggttgatcttgaaaccaaaagattaaaagagcagggattgataaagacgcaaggggatttagttacaaagcaacagaaagataaaataaaagagaactttgcaaacactttctttaaatatataacgaaattgaaggttagtattgatgtttctcttataaaaagcccacttgattatagtaaagtttatgaagtgggaggggctgcagaagatgcaagagcggttttaggatattatttggctttatatgatcatatttcagaatattgtaatgaagttgtaccgccacttgttattgatacccctaatcaacaagaacaatctaccgaaaactataataaaatagtcgaggctatttccagagggctaacggagaataagcagtatattatttgtgcaatgcaacataacgcattggatactctttcacaagatgcaaaagttattcgtttggatgaaagaaaaatacttacatcttccgagtatgaagaagctaaagaacttgaagaggtatttctttttatttga

SEQ ID NO: 92512 - DNA, 1080 bp, Escherichia coli
gtggcgttatcagatgcgttaattacagtaaatcaagccgaacggggcggtgaaaacgcgttgagaggcttttcatatcaagcctcttgggggataaattatttacttgagaaacaaaaagaaaaggagaaatatttatttctatttgaatatcatgacgatattcttgtattgaattcatctgtttctccgactagtgctgagtttatccaagttaaaacaaaaaaagatggtaaatggacactcgcagcaatagtgaacgcaacaaaagctaaacctaaatcatttgttgcaaaactatatgaccatttctatcaattcgttggtcacgaaatttatatggttctgttatcgaatgctggattcgatttcttaaatgataataacgaaaaaggtagtgatcttaataatgagcataaggaaattataattagtaaggttcaagagcagctaaatactaaaaaagaagttcctcttgataaaataaaatttaaaacatctgatcttagtttgttagatcctaactcacatttatacgggaaagttgcagtttttttgaattcttactttggggatgatcatggtattaattcaacagcattcactaaattattaatcaataagtgtaatgagaaggttagtgttgcttctagtgatatcagaacttttgaagatttagtactaaagaaaggtatatcttcagaatttgtaactgatttattatctggactcattgcaagcataaaaataacgccaaaatgggaacaggtttgtatgttgcttggtactttctcagatccttatgaggggattaaattacaatcagtttttacacgcatatcaataaaagtgctcaatgtcaattcaatatactatctttattttctggaatttcaatcggctctaaagagtatagagcattatcgtgagatacctgttcgagacctcttctttacactcgaaaaaacaattgcagcgggggacggggatttctctttattaaatcaagaagagaaatttatgattgctatatatgcaattataaagttgacttttgaggatgtttcttatgaagaataa

SEQ ID NO: 92513 - DNA, 1659 bp, Escherichia coli
atgaagaataacgttaaatttaaaaatataaaaatactctcattaagagacagaaaagctttttcttatgagttttcagaaggggttaacttcatatatggtacaaatgatgttggtaaatcaagcctgattaaaagtctttattacacattaggtggagatttaaggcttgatgatgcttggaaatcagatgatatagttacactggtggaaattaataacggggaaaatgattttatttttttacgttataaaaagattattggtgtctttgatttgaagaatgatgatctagtcgtgtataacacgatttcgtcattagcatctcgtgtttcaaatatatttggttttaaactggaattacataataaatatacgggtgctacgactcaggcaaaccctgcttgtttgtttgccccattctttattgatcaggatgaaggatggaaagcggtgataaattctttcgaaaacatgagtatgtactcagaatggcaaaaaaacattctttactatcactctggaattaagccaaaggaatattatacagttcaagggaaaatcaaagaaattaaagttaaaatttcagagttagatggttttgttaaggttctaaaaagaagcaaaagtaagattgatgaatcttttggcgtggttttatttgatgttgatttggatttttataaatcaaagttggaacgtatattaaatgaatattctaatttgaatttagttcagacagaatatagattgaatcttttgaggttatattctaggaagaatttccttgagagtgaactcaaagagataactgcgattattgataatgaatttgagatttcgaattttcgagatgataatgttgcttattcagtaaatgaatataattatataaaccatagagatgaaatgctcaaaaacattgctgttcttgcagatgagaaaagcaagattgaggaaaatattcctaaattgaatcaaaagctagaagagtcaagggctgcttcagaggcgttgcaggcgctgattttagaaactcaatcggaaataacgcttcatgatgttattaaatctgctgcataccatgaaattgaatctacttttatttcacagttagatgagttattcgttgagattggtcgaaaagaaggcgagttgacagaattacaagaagaattagaagtatacaatgataagaaaagaactgttaaaataaatgactgtttcaaagagtatttcgctaaagctcttaaagagcttggtgtcgaaaatacaaaggtaggtggccttagtagttataataatattactaagggcaagactggtagtcgaggtcctcgaggtatatttgcatttcactacgcgctgcttagtgttatgaaaagcaacgcttcagttgagaatatgcctatagtaatagactctccaaagcaacaagatttggatccagagcatacgcataagcttataaaactatgcttggatgggttttcccttacaaatcagattattattggaactgttggttatgagagtttcatggatggttttaatagcatcaaacttgaaaataaatatcatcttttaaatgatgaacattatgataatgtttattctcaattaatgccattgtttgaacgggtgatactttcaagatga

SEQ ID NO: 92514 - DNA, 1110 bp, Klebsiella oxytoca 10-5245
gtggctaaaaataaagcggtaaatgctggggtagatgccttaactggtttcgagtttcaaagaaactgtgcattatatcttttgttagataattttaattctttcattgacaaaaacttctttatttgtattgaacatcatgatgattttcttttttgctataaaactgactgtttagtttatattaacgagatatatgcctaccaagcaaaaaaacttagcggaaaaatatggactatcgatgctagattttctgaggtggtatctaaaattctattagttggggataatcttaaaaatgactctttcgaaaaaagtgaggattataggcatcagttaacatttatatcaaatacagaaatagagttaaaatactcgcctctaaagaagttaaaagctgaaggtgctactgagcagatagtaaagataaatgagcaaaactccacctgtgtttataataatttacatgaaagtattaaagctaaaatcgaaaatagaataacagaagtttgcaatgaagaatcttcggtttttcatcgacaagagttagataacttacatattcagtgggtcgatttcccaagaactgctgcgaaacaaaaagaatctcttattggactcatggttagaaaattccctcatatagctgatccgaaagcagctattgatgtaatacttactctatttagggatgtagagactgtatataaccaagggcaggaaatatgcctacttgatccaacaaaaagggttgaaggcgaagatataaaaaaagtcatgaatattattgattcacagcaaaaggcattcgactattggcgtgccgaagcaaagcaattctcaatgaaatttagcataccacttagcatacagaaaaaacatgaaaactatatacttaactcttttgaactactcaaggatatgagtaattacgattatcaaattatcaaagactttattagaaataatgattacacaactcaatatacttctctgcaagatgcattaactgcatatgttgataatattagaaaatctcattctataaacctggataatattgatacattttttgcagttctgtgttcttacgttgagtgctacgattaa

SEQ ID NO: 92515 - DNA, 1764 bp, Klebsiella oxytoca 10-5245
atgaagacaattataaagtttgatagattgtttgttgtctctgaaagtcataatttatatttcgaccaaaagttttcaaataaaataaacataataagtgggtgtaatacctcgggtaaaagtactttaatacagagcattttatttacctttggaattaatgatgttaaagatggtttgagcgaaattattcgatacaaacctacgttcagattggatttcagcatcactaaaagcggtgtagataaaaaatatataatagtaagagagcttggtagcatatatttaaaagaggatggggggaatgtttttagttttcatggtattgactctgatggtcgagttgaacatgtgaaacttaaggagatgttatctcaattatttgattttaacatgcttttagaacagaagggggagttaaaaaaagcatcgatagaatgtatgttcctgccttactatatttctcaatctgtagggtgggtttatttaagagagtcattctctaaccttggtttttataaggactttaaagacacgtatcttgattattatcttggcatagaaaattcttttgataaagaatatttttataagttaacaaaagagcgggcgcaacttcagtcgaagatctcctcattgagtaaatatagcactgagcctcactttgttgtttctaaattactggatgaagaattcggcgatgaggcacagaagtatattgatggttatataaatttagttgcatcattagacgaagaacgtgatgtatatacgagtttgtgtaataaattatccttaactaaaaatcatgtcaagatcctaagaagaactaaaagaaatatcaaaaaccaaaactataacaatattgaccgttgtcctgcatgtacgcaaatacttccttattccctagaggggttatatggttattatcaaaacatcaatgatactgataaactatcagagcaaataaataataaaatacaaaacatacagtctgatattaatggttcacttgcgaagattaaaaagttagaaattgatatatcttcaaactattcatattttcttgagaaaaaatcacaaaatgtatctgttaatacatggatcgataataaagcaaacatacgtcttttaagcaatattcatgaagagatagaagaacatacaaaaaggtctgatgaaattaaagggttgattgatgggatgggagaggagcagtctctttttgtcgagcggtttaacaaagaaaaagatttcaaggggatatttaaaaaataccttaatgacatgcagttattcaatgtaacagaacctagatatacagatctttataaaataaactcgttcccttttcaaggcgttgagcttcacaaaactgtaatgtcatatcattttgcattaaattctttaataagagaaacagacaatatacatcgacttccatttatgcttgatgcgattctaaaagaagatatcgatgacagaaattttgatctcatactttcgtttgttggaagaaatcttccgacagatactcaatcatttatatcgatgtctgagtattctgaagataacctcttgaaagatggtaaagatataaatgcattccgaagagccaaggtgaaagatattaagaatcgatactttcctgatgatacgaatttattctttattggtgatgggaagcatgagagatcatttttatcaaaacctttggatttaaacctcgatatttttgtcgatacttgtcggcttactgaatga

SEQ ID NO: 92516 - DNA, 1110 bp, Klebsiella oxytoca 10-5248; identical to SEQ ID NO: 92514

SEQ ID NO: 92517 - DNA, 1764 bp, Klebsiella oxytoca 10-5248; identical to SEQ ID NO: 92515

SEQ ID NO: 92518 - DNA, 1080 bp, Klebsiella oxytoca; identical to SEQ ID NO: 92466

SEQ ID NO: 92519 - DNA, 722 bp, Klebsiella oxytoca
atgaagaataacgttaaatttaaaaatataaaaatactctcattaagagacagaaaagctttttcttatgagttttcagaaggggttaacttcatatatggtacaaatgatgttggtaaatcaagcctgattaaaagtctttattacacattaggtggagatttaaggcttgatgatgcttggaaatcagatgatatagttacactggtggaaattaataacggggaaaatgattttatttttttacgttataaaaagattattggtgtctttgatttgaagaatgatgatctagtcgtgtataacacgatttcgtcattagcatctcgtgtttcaaatatatttggttttaaactggaattacataataaatatacgggtgctacgactcaggcaaaccctgcttgtttgtttgccccattctttattgatcaggatgaaggatggaaagcggtgataaattctttcgaraacatgagtatgtactcagaatggcaaaaaaacattctttactatcactctggaattaagccaaaggaatattatacagttcaagggaaaatcaaagaaattaaagttaaaatttcagagttagatggttttgttaaggttctaaaaagaagcaaaagtaagattgatgaatcttttggcgtggttttatttgatgttgatttggatttttataaatcaaagttggaacgtatattaaatgaatattctaa

SEQ ID NO: 92520 - DNA, 1110 bp, Klebsiella oxytoca
gtggctaaaaataaagcggcaaacgccggggttgatgcgttaacaggttttgagtttcaaagaaactgtgcattgtatcttttgttagataatttcaattcttttatcaataaagagttctttatttgtatcgaacatcatgatgattttctattttgttataaaactgattgcttaagttatataaacgagatacatgcctatcaagcaaagaaacttagcgggaaaatatggactatcgattctaggttttctgagatggtatctaaaatactattggtgggcgaaaacttaagaaatgatgcttttgaaaaaagtgaagattataaacaccagctaacatttatatcaaatacagaaatagaattaaaatactcaccgtcaaaggcgttaaaaaaagaaggtattactgagcagatattaaggattaatgagcaaaactctatctgtgcttatgatgaattacataaacacattcagaataaaattgaaaaaaaagttacagatatttgtaatgaagaatcttctgttttccatcgtaaagaactaagtaacctaaaaattcagtgggtagattttccaagaacggctgcaaaacaaaaagaatcgcttattggacttatgtctagaaagttttctcatatagctgactcgaaagcagctatcgaggtaatacttgctctatttaggaatgtggaaactgtatataatcaagggcaggaaatatgtctactcgatccaacaaaaagggttgaaggcgaagaagttaagaaagttatgaatataattgattcacagcaaaaggcattcgactattggcgtgccgaagcacagcaattctcaatgaaattcagaataccacttagcatacagaaaaatcatgaaaactatatacttaactcttttgaactactcaaggatatgagtaattacgattatcaaattattaaagactttgtcagaaataatgattacacaactcaatatgtttctctgcaagatgcattaaccgcatatgttgataatattaaaaaatctcattctataaacctagataatattgatacattttttgcagttctgtgttcatacgtagagtgctatgattaa

SEQ ID NO: 92521 - DNA, 1764 bp, Klebsiella oxytoca
atgaagacatttataaagtttgatagattgtttgttgtctctgaaagtcataatttatattttgatcaaaagttttcaaataagataaacataataagtgggtgtaatacctcgggtaaaagtactttaatacagagtattttatttacctttggaattaatgatgttaaagatggtttgagcgaaattattagatacaatcctacgttcagattggatttcagcctcactaaaggaggtgcagataaaaaatatataatagtaagagagcttggtagcatatatttaaaagaggatgacgggaatgtttttagttttcatggtattgactctgatggtcgagttgaacatgtgaaacttaaagagaagctatctcaattatttgattttaatatgcttttagaacagaagggcgagctaaaaaaagcatcgatagaatgtatgttcctaccttactatatttctcaatctgtagggtgggtttatttaagagagtcattctctaaccttggtttttataaagactttaaagacacgtatcttgattattatcttggcatagaaaattcttttgataaagaatatttttataagttaacaaaagagcgggcacaacttcagtcgaagatctcctctttgaataaatatagcactgagcctcactttgttgtttctaaattactggatgaagagttcggtgatgaggcacagaagtatattgatggttatataaatttagtagcattattagacgaagaacgtgatatatatacgagtttgtgtaataaattatccttaactaaaaatcatgtcaagatactaagaaaaactaaaagaaatattaaaaaccaaaactataacaatattgatcgttgtcctgcatgtacgcaaatacttccttattccctagagggattatatggttattatcaaaagatcaatgatactgataaactatcagagcaaataaataataaaatacaaaacatacagtctgatattaatggttcacttgcgaagattaaaaagttagaaattgagatatcttcaaagtattcatcgtttcttgaaaaaaaatcacaaaatgtatctgttaacacatggatcgataataaagcaaacatacgtctattaagcaatattcatgaagagatagaagaacatacaaaaagggctgatgaaattaaagggttgatcgatgggatgggagaggagcagtctctctttgtcgagcggtttaacaaagaaaaagatttcaaggggatatttaaaaaatatcttaatgacatgcagttgttcaatgtaacagaacctagatatacagatctttataaaataaactcgttcccttttcaaggtgttgagcttcacaaaactgtaatgtcatatcattttgcattaaattctttaataagagaaacaaacaatatacatcgacttccatttatgcttgatgcaattcttaaagaagatatcgatgacagaaattttgatctcatactgtcgtttgttggaagaaatcttccgacagatacgcaatcatttatatcgatgtctgagtattctgaagacaacctcttgaaagatggtaaaaatgtaaatgcattccgaagagccaaggtcaaggatattaagaatcgatacttccctgatggtacgaatttattctttattggtgatgggaagcatgagagagcatttttatcaaaacctttggatttaaacctcgatatttttgtcgatacttgtcggcttactgaatga

SEQ ID NO: 92522 - DNA, 1185 bp, Klebsiella pneumoniae EGD-HP19-C
atggctgagttacatgaagttaaaccaagagagcaagcgggaagagacactttagaacgctataatgctcagatcagagcagcaagtattgcatgtttgtctatcctagaaggtaaagatgtcaaacgcgttttttgcgaatttcacgatgattttgtcattgaaaaagtcattgctagtgatattcgttacacatttgtacaagtcaaaactaaggagaaactgcgagaaatttggaaactacgagacgtttttggaattttaaaaaggaaaagtgcaaaaaatcctcagacagatgaaatgatcagagatagtttcatcgggaaactattacaacatacgattaatttcggagagtcttgtaatgaaattgttttccttacaaatacgcatgttgatgaagatatagagaacattatcgatgatatcgtttctgaaaccttttctaatacacactgcaaacttataattgactcgtttaataattgcttcatctcaatccaggaagatcacgaaaagctagatattgatgcgataaaacaaaagcttaagaaactaaaatttgaaactgatgttgaatatattaaaagcaaacatgaaacgtttgaaatacttgctaaacagaagatatttaaatttagcgaaattgaactatcacacactgaagcaaaagaaatattattttcgcttttggcactagtaaactcaaaatcaagtgtaaaaattaatgattgttcaagcgaaaatataaaaaagctggctggtatagatatcgatgatctcctggatgttctcagcatctcaaaacgtgcttattatgactttttagataatggcgatgaacacgccctaaaatcagcgtcagtaattgaaagattgctgagaaaagcaggagccaacgacatggaagtagattttttcacaagatgtaaaataaaatgggatcagtggttaaggaataatagacatattatatctgagtttgattatatcacaatcgacagagaaattaatgcaaccttagataaattaacgtttctgcatggaaatttatttttatcaaacttaagaacattcattaatgaattatatgattcattacatcaaaataatttacttcattccttagataaagaggctttaaccggaagtcttttttccagattagtagagcgttcaaaatga

SEQ ID NO: 92523 - DNA, 1752 bp, Klebsiella pneumoniae EGD-HP19-C
atgaaacttgtaagtataaaaattaaaggtaggggaattgttgggcttgaatccgacgaacttgtttttggtaaaaatattactgaattttacggacctaatgggtgcggtaaaacgccactactgcaatcaatctcttattgccttggatacccatgcaaatttagagatgatatttataaattatgcaaatctgccacccttacttttacgatagctaataatatttttaaagccactagagactttgaacataccgacttcattttgtccttagaaagcaataatgagatattgaagttttacaatgaagctgattattctaagtacattttcgaaaaactatctttaaattacccatcacttcttacaactcagaacaaacagtcttatccttacttatcaactattcttcctatattttatcttgaccaagacttaggttactcaaaattttattactcgccaagaaactttattaaagatcagttttctgaaatgctcagaatagtattctctttgccagaaaaacattcttttgatgctaaaaagaaaaatattaatcttacagaagaaattaaatatttagataattcattagcagtacaaagaagaaatattgaaatagctaaagatgcccataaagataaaaacatcgaatcaatcgatagttccattaatagtctgaaagacgaacttactgaactgaaaaatagcaaatcattaaaaaatgattctcttgtgagcatagatgcagtcataagaaatcaaaaagaaaacctaaacactctcaagtcagaattaaaattcatggaaagaagagagtcatcattattacaaataatgaaagaaattaacactgaaataaatactctcaatctaaatgaggaagctaaaagaatatttcgctcttttgaggaaatttgcccatccctagattgcaaaatgtttacaagaagttctgaaagctatgcaaaacatcttttatatcttaaagatcaaattaaagatattgaaagaagtttaaatttagatagtgatcggcatgacgcgatagaacaggaaataaaacacacgagtaagatcatcgaagacctgaacactatgagaaccaatattattgaagaggaagatatatcttcagtaattgacgctgtttctgaaataacatcaatgttatttaagctacaacttgagaaaaatgaattaaataaaatagcattattagaggcaaagtatgttgaaatgcttaataaacgtgaacacgctttagacgaattagatggtctcgataaaaatagacagacaatccctagattggcaaaggttaagacaaccttacgagataaattcatattctggttaaaagtattgaaaacccctaacattgatttcaatattacatttgaaaatgatttcagtccaataatgggctatgaaaccttagaacaattaaaaggcagcactagatcacgagctatactagcttatagaagtgcattgatagaaagcatgatagaattaaattgcaagtcatttatgtttgctatatttgatactccgaagcaacatgaaatacatcacgaagacatagataattttattatggctttaaagaaattatctaaagaacataattttcagtttatattctcgtcaacagaatacaaatataatggtgatgatgatgatatcattttaactcctgagtatccaggggatcagcatgacatgttcttaagaagatattag

SEQ ID NO: 92524 - DNA, 1185 bp, Klebsiella pneumoniae UCICRE 6
atggctgagttacatgaagttaaaccaagagagcaagcgggaagagacactttagaacgctataatgctcagatcagagcagcaagtattgcatgtttgtctatcctagaaggtaaagatgtcaaacgcgttttttgcgaatttcacgatgattttgtcattgaaaaagtcattgctagtgatattcgttacacatttgtacaagtcaaaactaaggagaaactgcgagaaatttggaaactacgagacgtttttggaattttaaaaaggaaaagtgcaaaaaatcctcagacagatgaaatgatcagagatagtttcattgggaaactattacaacatacgattaatttcggagagtcttgtaatgaaattgttttccttacaaatacgcatgttgatgaagatatagagaacattatcgatgatatcgtttctgaaaccttttctaatacacactgcaaacttataattgactcgtttaataattgcttcatctcaatccaggaagatcacgaaaagctagatattgatgcgataaaacaaaagcttaagaaactaaaatttgaaactgatgttgaatatattaaaagcaaacatgaaacgtttgaaatacttgctaaacagaagatatttaaatttagcgaaattgaactatcacacactgaagcaaaagaaatattattttcgcttttggcactagtaaactcaaaatcaagtgtaaaaattaatgattgttcaagcgaaaatataaaaaagctggctggtatagatatcgatgatctcctggatgttctcagcatctcaaaacgtgcttattatgactttttagataatggcgatgaacacgccctaaaatcagcgtcagtaattgaaagattgctgagaaaagcaggagccaacgacatggaagtagattttttcacaagatgtaaaataaaatgggatcagtggttaaggaataatagacatattatatctgagtttgattatatcacaatcgacagagaaattaatgcaaccttagataaattaacgtttctgcatggaaatttatttttatcaaacttaagaacattcattaatgaattatatgattcattacatcaaaataatttacttcattccttagataaagaggctttaaccggaagtcttttttccagattagtagagcgttcaaaatga

SEQ ID NO: 92525 - DNA, 1752 bp, Klebsiella pneumoniae UCICRE 6
atgaaacttgtaagtataaaaattaaaggtaggggaattgttgggcttgaatccgacgaacttgtttttggtaaaaatattactgaattttacggacctaatgggtgtggtaaaacgccactactgcaatcaatctcttattgccttggatacccatgcaaatttagagatgatatttataaattatgcaaatctgccacccttacttttacgatagctaataatatttttaaagccactagagactttgaacataccgacttcattttgtccttagaaagcaataatgagatattgaagttttacaatgaagctgattattctaagtacattttcgaaaaactatctttaaattacccatcacttcttacaactcagaacaaacagtcttatccttacttatcaactattcttcctatattttatcttgaccaagacttaggttactcaaaattttattactcgccaagaaactttattaaagatcagttttctgaaatgctcagaatagtattctctttgccagaaaaacattcttttgatgctaaaaagaaaaatattaatcttacagaagaaattaaatatttagataattcattagcagtacaaagaagaactattgaaatagctaaagatgcccataaagataaaaacatcgaatcaatcgatagttccattaatagtctgaaagacgaacttactgaactgaaaaatagcaaatcattaaaaaatgattctcttgtgagcatagatgcagtcataagaaatcaaaaagaaaacctaaacactctcaagtcagaattaaaattcatggaaagaagagagtcatcattattacaaataatgaaagaaattaacactgaaataaatactctcaatctaaatgaggaagctaaaagaatatttcgctcttttgaggaaatttgcccatccctagattgcaaaatgtttacaagaagttctgaaagctatgcaaaacatcttttatatcttaaagatcaaattaaagatattgaaagaagtttaaatttagatagtgatcggcatgacgcgatagaacaggaaataaaacacacgagtaagatcatcgaagacctgaacactatgagaaccaatattattgaagaggaagatatatcttcagtaattgacgctatttctgaaataacatcaatgttatttaagctacaacttgagaaaaatgaattaaataaaatagcattattagaggcaaagtatgttgaaatgcttaataaacgtgaacacgctttagacgaattagatggtctcgataaaaatagacagacaatccctagattggcaaaggttaagacaaccttacgagataaattcatattctggttaaaagtattgaaaacccctaacattgatttcaatattacatttgaaaatgatttcagtccaataatgggctatgaaaccttagaacaattaaaaggcagcactaaatcacgagctatactagcttatagaagtgcattgatagaaagcatgatagaattaaattgcaagtcatttatgtttgctatatttgatactccgaagcaacatgaaatacatcacgaagacatagataattttattatggctttaaagaaattatctaaagaaaataattttcagtttatattctcgtcaacagaatacaaatataatggtgatgatgatgatatcattttaactcctgagtatccaggggatcagcatgacatgttcttaagaagatattag

SEQ ID NO: 92526 - DNA, 1185 bp, Klebsiella pneumoniae MGH 21; identical to SEQ ID NO: 92458

SEQ ID NO: 92527 - DNA, 1752 bp, Klebsiella pneumoniae MGH 21
atgaaacttgtaagtataaaaattaaaggtaggggaattgttgggcttgaatccgacgaacttgtttttggtaaaaatattactgagttttacggacctaatgggtgtggtaaaacgccattactgcaatcaatctcttattgccttggatacccatgcaaatttagagatgatatttataaattatgcaaatctgccacccttacttttacgatagctaatgatatttttaaagtcactagagactttgaacataccgacttcattttgtccttagaaagcaataaagagatattgaaattttataatgaagctgattattccaagtacattttcgaaaaactatctttaaattatccatcacttcttacaactcagaacaaacagtcttatccttacttatcaactgttcttcctatattttatcttgatcaagacttaggttactcaaaattttattactcgcctagaaactttattaaagatcagttttctgaaatgctcagaatagtattctctttgccagaaaaacattcttttgatgctaaaaagaaaaatattaatctcacagaagaaattaaatatttagataattcattagcagtacaaagaagaaatattgaaatagctaaagatgcccataaagataaaaacatcgaatcaatcgatagttcgattaataatttgaaagacgaacttactgagttgaaaaatagcaaatcattgaaaaatgattctcttgtgagcatagatgcagttataagaaatcaaaaagaaaacctaaacactctcaaatcagaattaaaattcatggaaagaagagagtcatcattattacaaataatgaaagaaattaacactgaaattaatactctcaatctaaatgaagaagctaaaagaatatttcgctcttttgaggaaatttgcccatccctagattgcaaaatgtttacaagaagctctgaaagctatgcaaaacatcttttatatcttaaagatcaaattaaagatattgaaagaagtttaaaattagatagtgatcggcatgacgcgatagaacaggaaataaaacacacgagtaagaccatcgaagacctgaacactatgagaaccaatatcattgaagaggaagatatatcttcagtaattgacgctatttctgaaataacgtcaatgttatttcagttacaacttgaaaaaaatgaattaaataaaatagcgttattagaggcaaagtatgttgaaatgcttaataaacgcgagcacgctttagacgaattagatagtctcgataaaaatagacagacaatccctagattagcaaaggttaagacaaccttacgagataaattcatattctggttaaaagtattgaaaacccctaacattgatttcaatattacatttgaaaatgatttcagtccaatcatgggctatgagaccttagagcaattaaaaggcagcactaaatcacgagctatattagcttatagaagtgcattgatagaaagcatgatagaattaaactgcaagtcttttatgtttgctatatttgatactcctaagcaacatgaaatacatcacgaagacatagataatttcattatggctttaaagaaattatctaaaaaacataattttcagtttatcttctcgtcaacagaatacaaatataacggtgatgatgatgatatcattttaactcctaagtatccaggagagcagcatgacatgttcttaagaaggtattag

SEQ ID NO: 92528 - DNA, 1089 bp, Klebsiella pneumoniae HK787
ttgtctatcctagaaggtaaagatgtcaaacgcgttttttgcgaatttcacgatgattttgtcattgaaaaagtcattgctagtgatattcgttacacatttgtacaagtcaaaactaaggagaaactgcgagaaatttggaaactacgagacgtttttggaattttaaaaaggaaaagtgcaaaaaatcctcagacagatgaaatgatcagagatagtttcattgggaaactattacaacatacgattaatttcggagagtcttgtaatgaaattgttttccttacaaatacgcatgttgatgaagatatagagaacattatcgatgatatcgtttctgaaaccttttctaatacacactgcaaacttataattgactcgtttaataattgcttcatctcaatccaggaagatcacgaaaagctagatattgatgcgataaaacaaaagcttaagaaactaaaatttgaaactgatgttgaatatattaaaagcaaacatgaaacgtttgaaatacttgctaaacagaagatatttaaatttagcgaaattgaactatcacacactgaagcaaaagaaatattattttcgcttttggcactagtaaactcaaaatcaagtgtaaaaattaatgattgttcaagcgaaaatataaaaaagctggctggtatagatatcgatgatctcctggatgttctcagcatctcaaaacgtgcttattatgactttttagataatggcgatgaacacgccctaaaatcagcgtcagtaattgaaagattgctgagaaaagcaggagccaacgacatggaagtagattttttcacaagatgtaaaataaaatgggatcagtggttaaggaataatagacatattatatctgagtttgattatatcacaatcgacagagaaattaatgcaaccttagataaattaacgtttctgcatggaaatttatttttatcaaacttaagaacattcattaatgaattatatgattcattacatcaaaataatttacttcattccttagataaagaggctttaaccggaagtcttttttccagattagtagagcgttcaaaatga

SEQ ID NO: 92529 - DNA, 1752 bp, Klebsiella pneumoniae HK787
atgaaacttgtaagtataaaaattaaaggtaggggaattgttgggcttgaatccgacgaacttgtttttggtaaaaatattactgaattttacggacctaatgggtgtggtaaaacgccactactgcaatcaatctcttattgccttggatacccatgcaaatttagagatgatatttataaattatgcaaatctgccacccttacttttacgatagctaataatatttttaaagccactagagactttgaacataccgacttcattttgtccttagaaagcaataatgagatattgaagttttacaatgaagctgattattctaagtacattttcgaaaaactatctttaaattacccatcacttcttacaactcagaacaaacagtcttatccttacttatcaactattcttcctatattttatcttgaccaagacttaggttactcaaaattttattactcgccaagaaactttattaaagatcagttttctgaaatgctcagaatagtattctctttgccagaaaaacattcttttgatgctaaaaagaaaaatattaatcttacagaagaaattaaatatttagataattcattagcagtacaaagaagaaatattgaaatagctaaagatgcccataaagataaaaacatcgaatcaatcgatagttccattaatagtctgaaagacgaacttactgaactgaaaaatagcaaatcattaaaaaatgattctcttgtgagcatagatgcagtcataagaaatcaaaaagaaaacctaaacactctcaagtcagaattaaaattcatggaaagaagagagtcatcattattacaaataatgaaagaaattaacactgaaataaatactctcaatctaaatgaggaagctaaaagaatatttcgctcttttgaggaaatttgcccatccctagattgcaaaatgtttacaagaagttctgaaagctatgcaaaacatcttttatatcttaaagatcaaattaaagatattgaaagaagtttaaatttagatagtgatcggcatgacgcgatagaacaggaaataaaacacacgagtaagatcatcgaagacctgaacactatgagaaccaatattattgaagaggaagatatatcttcagtaattgacgctatttctgaaataacatcaatgttatttaagctacaacttgagaaaaatgaattaaataaaatagcattattagaggcaaagtatgttgaaatgcttaataaacgtgaacacgctttagacgaattagatggtctcgataaaaatagacagacaatccctagattggcaaaggttaagacaaccttacgagataaattcatattctggttaaaagtattgaaaacccctaacattgatttcaatattacatttgaaaatgatttcagtccaataatgggctatgaaaccttagaacaattaaaaggcagcactaaatcacgagctatactagcttatagaagtgcattgatagaaagcatgatagaattaaattgcaagtcatttatgtttgctatatttgatactccgaagcaacatgaaatacatcacgaagacatagataattttattatggctttaaagaaattatctaaagaaaataattttcagtttatattctcgtcaacagaatacaaatataatggtgatgatgatgatatcattttaactcctgagtatccaggggatcagcatgacatgttcttaagaagatattag

SEQ ID NO: 92530 - DNA, 1086 bp, Klebsiella pneumoniae
atggaaagtaatattttaggtcatgctcagagagaaacttcaggagcaactacatttggaaaatataatttccaatatcattgggctttatgcagaataattgaaaaacataaatccaatgcagactatgcattattaattgaatatcatgaggatgtcgttatcgcagactcattgtttggcagttcggcgaagtttgaattttttcaagtgaaaaatactgggaattccttcactgttgactctttaactaaacgagtaaaaggtgcagagggacttaagaactccattctaggaaaactattaagctcatgtataggcactgagtatgaaacacgtattacggaaataggtcttgtatcctctagtggcttctcatttgatcagaaagataataagttaaagttagatattataacttcgggtgatcttagcgtggattgtctatcgggcttaactgggaaattaaagtccgagcttgggatagatatttttccagaaaatctaaagttcatcattccaaaaataaagttagaaaatcaagaagaattcgttattgccagatttgctgaattagtaaatgaaatatttccaaatagtcattgtaatgctgtcaatatttatagggcaattatcgatgagattcatcgcaaaggacagaatacttacgactttactatgtgggagaaaatggtagaggataagtctctcacatctcatacggtaaaagatgtcatagctgtaaatacaacgagtccaaaatttgaagactttgagaaagactttgagtatttagctaaaagcgatatgaaatggaataccttaacatatcgaaagatggtaagaaaaataaaacaaatttacttacgtagagtcgggtatgcttcagcttttgatatgaatataatgagaatagctcaacaggcgctcagtaatgttccggaagaagactatactgaaacaagcgattacattaaggcagttgttatgaaagctaaagagctgaatattgaaagccaaatcccagaagatgatgatatactttgcgagataatttactgttttttgaaggtgatgcatgaataa

SEQ ID NO: 92531 - DNA, 1734 bp, Klebsiella pneumoniae
atgagaagcttgcaatttcaacgattggttctgatatcagattcgaaaagacttgcgaatcagttcacgttcccgaagagattgaatctaattacaggagaagataacagtatcggcaagtccactctagccaagagtttactatggtcgctaggatgcgatccagttatcgacgaagaatggaaatcaaatgacattaaatcgatattatatttcactataaataataaaaaatatttttcttgccgtggaagccactcaataattttgggcgctatcgatggtgaagcgaaaagatacacacatataactggtgatttttcacaagacctatcagatcttgttaactttaaaatgaagcttcctaatcggactgatgggaaattagagactcctccgccagcatattattttttaccattctatattgaccagataaaaagctggagttctccttgggattcatttgaaaacttaggtcagtatgccaactggaaaaaatcgttaataaagtattttactggctatctgaaaccagaacattttgaattagaagaagaaatttatgaatatagtgaggtaaaaaaagaatcaacagcaaaaatagaaaaatttcaaagcgcagttgacgtcatagttgataattctgctgatatcaccatagcattagataatgagaaatttagcgaaattcagaaagagataaatactgagcttcaagagtttatcgattaccaaaggaagctttatgatgctcaggctacgattacctcaaatatatatgatctcgaaaaacagtatgaattagccaccagttctgcaaacgaactcgaagaagattataagtttgcggtcgagtctataccgacagatcatttagagtgcccattgtgtggtactcttcacgataactcactgactaacagagcattgcttctttcagagaaggattcgctacttgacgaggcaaactcaatagcatcagaaatagaggcgcttagatcctcattatttgagttaaatgaagtagctcaatttgctactaatgaaattgaaagaattaataagaagtatctcaccgatgacaatgagggcgaaaaaacactcattacacaagtaattgatgctatttcgaaagaaaaggtctcaagaagtattcaagttaaaattgataatgaagatcttaaaatcagcaaagccaataactctgtcgcagaattgaaaaaagatcagagaaaacttctttcaaacaaggataaggaagaactgaattcttcttttatgtcaaagctattgggaaatattgaagcactaggttcaacaggagtaaatcttagcaaagtgaaatcgcctactgattataaacagttacttggtggcggtgctgctgaggctgccaggggattgcttgcttatcaactctccgtactgcaacaaatacatagtgctaaaacttgcatagtgcctcctttcgtcattgatacacccaaccagcaagaacaggcggggcatcgttatgaaaccgtcatcaaagaactaatgcgcagtatcccagaggattatcagataatactgtgtgcaatggagaataatgcattaaatgaatttaaacatgatgccaatgttattacattaaattctgaaaagttattggattcttcccaatatgactctctaagatctgagtataaaaacattcaattggctgtaagagaaacgagggatgatgattaa

SEQ ID NO: 92532 - DNA, 1074 bp, Klebsiella pneumoniae
gtgaaccttgctgatgcattaatacacgttccccaagacgaacgtgggggagaaattgcgattcgaggatttgagtatcaacgatgctgggcaatagatgaattgttgaatcgtcataaaaaaaacgaatcatacgtatttatacctgagtatcatgatgatgttttaattcttaattcctctgaatcgcccactatggcaacgtttgcacaagtcaaaacaagagatacacactggacaatcactccgttaataaagtctgatggtgaaggtaagttatctttcataagtaagttgtttaaacataaatacgatttttcttcttataaaactgatttaacattcattactaatgctgtgtttaagttttttgataagtatgaatttaatgcagatgagctaaaggtgtcagaaaaagataaaatattagatgctgtgaaaacccagttgccgggatttggttctccagatttatcatctctcaaattcaaaacatctaatctcagtcttttggactacgacgcacaccttttaggcaaaacagtcgaatatttagaagatacaaaatcttctgaagtaattaatgcaatggcgttcaaaagaaccctcgttgacctttttgaaaagaagacaagagtttcatccagagaaattaaatcatttaaagaattaatagataaaaaaggaataagtaatgagcttatagctaagttgatctcagaaataaaatctcttaagacaagtttccctgactgggagaaaattagtattctgctatcagtgctgcacaaagatgaatttgaaacgctgatgcttaaaattaagtacgaattgttcttggtaaatgttaaggatataaattcaattgagtatgatttttatcgattattaaagcaaaaaagaattaatgaaaaatttaatgccgaaaatatacctattcatattgaagaaatgatctcttatgcattagaagaaagtgatgagttcagacaattgattgatgatgattataaatatataatggcatgttgtgcggttattgagaagatgtcaggcaatgaggcgaaaaaatga

SEQ ID NO: 92533 - DNA, 1665 bp, Klebsiella pneumoniae
atgaatcaggtaatatttaagagagtcgccatattgtcgctttcagagaaaaaagcttttacttttaatttctcagaaggtttgaacttcattcatggtacgaatgatactggaaagtcaagtctaatcaagagcctgtacttttgccttggtggggatttaaggcttgatgacagttggaagaagcaagagataattactaagctaacattagcttatcaagatgaaattataaactttatcaggaaatcatcctatttcgtagttactgtgcataagaatggagtgaaaaaatcagaaaagatttttagcaaagtatctgagttaacaagtgaaattcaaaatttatttggatttaatcttctgttagctcttaagaagaataaagaaacaataattgcaaatccggcttcttattacttcccattttatattgatcaggatgatggttggagtaatgtacttgattcatttaacggcctaaagatgtatgtggattggcaaaaaaatgctctgcaatatcactcaggtatcaagccaaaagagtattatgctctcaatggggagcaaaaaatattagcattaaaaatttcagagcttgagcaagaagcggaacttatacgaaaaacaaagcttaggtttgaaaagtatttcgaaaacattagttttgatattgatgtgaatttttatcttaataaaattgattattttataaaacagtgtgaggaattggagcagcaagaaagagcatatagattaaaagcaatgaatctatactcgaggagaaatatattatctgatctcattttcagtattgaaaacgagagggctgattcctctggcaatacaagtgaagaggatgatatttcttttgcgttaaaaaaatatgatattaacaaaaataaagttgccttattcagccaaaaagcaagtttatatgatgaaaagagtaaggttgatgagcaacttatgactatcagaagtaaattattagagcatgctgaaatgagtgatcatattaagtctatgcttaataatgtacatgataatttctcgattaaagaaattattgactctgaggcttataaaagtgcagccttagcatttgaagaacaattatcggagatccgagaaaagataaatgcattagccttagaaaaggcagtccttgatactaaaataaaaacctttaacaatgtgaaaagaactagaataattaacgattattttctttctatgctcaatagggcgcaagtaaaactgcacttaccaatcactgaaaaaggtggtgttataaattataaagctttaactacaggtaaaacgggtagtcggagtccaagagcaatatttgcatatcattacgctttgttaatgacaattaaaaaatactctacactaccgattttaccaattgttatcgattcaccaaagcaacaagacctggatgatgaattaacagagcaactaattcagttttgtttggatgatcttgctgaggtatctcaagtaataattggcgcagtcaagccagaaaaaaatatggtcggttatcattctattaatttagttaagaagtttagtctacttcaacctgaggcttttagtgaggtttatcaagaggttgtgccgcaatttaatgctatgttcagacatttgaactaa

SEQ ID NO: 92534 - DNA, 1185 bp, Raoultella planticola
atggccgagttacatgaagtaaaaccaagagaacaagcaggaagagataccttagaacggtataatgctcagattagagcggcgagtatcgcatgtttgtcaatcttagagggcaaagacgttaaacgtgttttttgcgaatttcacgatgattttgtgattgaaaaagttgtcgctaatgatattcattacacatttgtgcaagtcaaaaccaaggagaagcttcgtgaaatatggaaacttcgagatgtttttggaatcttaaaaaggaaaagtgtaaaaaaccctcaaaccaatgaaatgatcagagatagttttgttgggaaattattgcagcacacgactaattttgaagattcctgcaaagaggttgttttccttacaaatacgcatgttgacgaagatatagagaacattattaatgacatatcatctgaaactttttcaaacacacattgcaagctaattattgactcatttaataactgctttatctcaattcagaataaacaaaaagagttaggaattgacgcaataaaactcaagcttaagaaattaagattcgaaactgatgtagaatatataaagagcaaacatgaaacatttgagatacttgcaaaagagaagatttttaaatttagcgaaatagagctatcgcatagtgaagctaaagaaatacttttttccctcttagctcttgtaaattctaagtctagtgtaaaaatcaatgactgttcaaaagaaaatatagaaaaactcgcaggagttgatattaatgaccttctagaagttttaagcatctctaaacgtgcttattatgatttcttagagaatggtgatgaacatgctttaaaatcagcatcagtaattgaacgattactgagaaaagcaggagctagcgacatcgaagtggatttttttaccagatgtaagatcaaatgggatcagtggctaaggaataacagacacattatatctgaattagattacatcacacttgaaagagaaattaattcaactttggataaactaaccttcatgcatggaagtttatttatttcaaacttgagaacattcatagatgaattatatgattcattacataagcataacttacttcattctttagataaagagactttaataggaagtcttttttccagattagtagagcgttcaaaatga

SEQ ID NO: 92535 - DNA, 1752 bp, Raoultella planticola
atgaagctgataagtataaaaattaaaggtagagatatagtcggccttgaatccgaagagctaatctttgggacaaacataactgaattttatggccccaatgggtgtggaaaaacaccattattacaatcaatctcttattgcctaggatacccgtgcaaatttagggatgatatttataaactatgtaaatctgccactcttacgttcactatagctaataatacttttcgtgctacaagggactttgaaaataccgacttcattttaaccttagaacaaaatgaagagacattaagattttacaaccaagctgattattcaaaacatatctttgaattgttatcactcagttatccatcgcttcttacaacgcagaataaacagtcttacccctatttatcgactattcttcctatattctatcttgatcaagatttaggttactcaaaattttattattcaccaggtaacttcataagagatcaattttctgaaatgctcagaatcgtattttcgttgcctgaaaaacactcttttgacgctaaaaagaaaacaattaatattacagaagagataaaatatcttgataactcattagcagtacaaaggagaaatattgaaatagctaaagaaactcacaaagataaaaatattgaggcaattgatagctctattgataatttaaaaaatgaactttctgaattaaaaaatagtaaatcattaaaaaatgattctctgtttagcatagaggcggtaataaaaaaacaaaaagaaaatttaaatgatctgaaatccaaactaaacttcatggaaaggagagagtcttcattgttacagataatgaaggagatcaatactgaaatagaaactctaaaccttaatgaagaagccaagagaatattccgttctttcgaggaaatttgcccatctcttgattgcaaaatgttctcccgcagctctgaaagctacgcaaaacatctgttatatctaaaagatcaaattaaagacattgaaagaagtttaaatttagatagtgatcgccatgacaagatagaacaagaaatcatatacaccagtaagaccattgaagatcttagtactatgagaaataacatcattgaagaggaagacatatcatcagtaattgatgcgatttccgaaatatcatccatgctatttaagttgcaattagaaaaaaatgagttaaataaaataacaatattagaagacaaatatattgaaatgcttaataagcgtgaatatgctttagatgaattagctggactcgagaaaaataggcaatcaataccgagactggcaaaaataaaaacgactcttagagataaattcatcaactggttgaaggttttaaaaactccaaatattgatttcaatgttacatttgaaaatgacttcagccctatcatgggctatgaaacattggaacaattaaaaggaagtactaaagttagagctatacttgcatatagaacagcattgatagaaagtatgcttgaactggattgtaagtccttcatgtttgcgatatttgatacaccaaagcaacatgaaatacattatgaagacatcgacaattttatcatgaatttgaaaactctttctaagagatacaacttccagtttattttttcatcaactgaatacaaatatgaaggtgatgcagatgatgtcttattaactcctaaatatcctggagagcagcataacatgtttttaatgagatattag

SEQ ID NO: 92536 - DNA, 1185 bp, Morganella morganii SC01
atggttaaattgcatgaaattagcccaagggagcaggtaggacgagatgtaattgagaggttcaatgctcaaatcagagctgcgagtatggcctgtttttcaatcttagaagggaaagatactaaaaaaatttattgcgaatttcaggatgattttgttattgaaaaagttattggagacactactaaatatgtttttgtccaagtaaaaactaaaagaaaacttagtgatatatggaacataaatgatgtttttggaatattgaaaaaagaaacaaaaactaaggttcagtcagatgagaatattcgtaatagttttataggtaaacttttacagcatactattaattttcctgacacatgcgataaggttgtatttatgacaaatacgcatgtagatgatgatatagttactctattgctcgatcttagcaataattataatggaaaacatagtaaggttttaattgatagatttaataaatgttttcatgataatggtaatatagaaaaaaataattttagtgatgaagatataagctttaaattaaaaaaactagagatagaaacagatgttgagtacttgaaggaaaaatttgatgcattttactctattgcaagggactcaatatataaatatagcgaaattgatttagaatacaatgaagttaatgagataatgatatctcttctaaatttagtcaataaaaaatccagcgttaaaattgatgtggtaaatcaagaaaacattgaagttagctcgggaattggaattgatgacttattaaaagtgcttagtatttctcataaagcttatcatgacttgcttgatagtggtgatcagaatgcaattaaatcagcatctatcattgagcgaactttgcgacgggcaggtgcttctgatgagcaaattttattttgttcagattgtaaaataaaatgggatagttgggttagaaataataggcatattttaagtaggatagatctaatttctattgatagctattttcaagactcactaaatgagctgtctaaaggtagtatgatcattggaattagtttcttaaaacatcttgttttgaaattgaaagaagaattaggaaataacggattattatttgatctcgatgatgaaacaataataggtgggatactgtctaaagtgattgggtacaaaaaatga

SEQ ID NO: 92537 - DNA, 1749 bp, Morganella morganii SC01
atgaggctattaagcttattccttaaaggaagagaaaatattggacttgagtctgatgagttagtttttggtaaaggcattactgagctttatggacctaatggtagtggaaaaacaccattaattcaatcaattatattctgtctgggatacccatgcaaatttagagaggaaatatatcggtcatgtcactatgcaaggcttaaatttgaaattgatggtaaactctatatttcagaaagggagttatcaaatgattttattttaaatatatactttggtggcaaagtaaaaagattttacaatgagattgattattcaagatttatttttgaactactaaacatgggctttccatctttaattactaatcagaaaaaacaaacgtacccatatttatctacgattttacccatctattaccttgatcaagataacggattctctaaatattataatgcgccggctaattatattaaagaccaattctctgaaatgctaagattaattttcaatctaccagaaaaaaattcatttgaaaagaaaaagctatcaatagaccttgattcagagataaaatatctagatgaatcacttgtagtacaaagaagaaatattgaattaataaaaaatgaaataaatgaaaccaataagatcaaattagattctcaaataaatgaattaaaagaagagttagatgaattaaaggagagtggctcagtaaaaaatgacgccatttcaggcatagatactttaatatataattataaaaaaagcattaaagaattaaaggtaaaatctagagatcttgaaaaaaggaatgtatcacttggtaaaataaaagatgagataaatatagaaattaatactcttaatctaaatgaagaggctaaacgaatttttatttcttttgaagagatttgtaattctccttcctgtggtctatttagtaaaagcacagaaaattatgcaaaaaatcttttatatttaaaagatcaaataaaggatatagatagaagtattaatacagggggtttaaatattgaaaatatattttccaatatatcacaattagaattttcgatgaaacaggcccaagaaataagaaagggaataattgataatgaaggattttcttccattatagagactatctctactattacagcaaggatttttgaattacagcaggaaaaagaaaaattagtaaatttagaaagagcagaatctatttatattgagagcttaaatagaagggatttaatattagacagaaaggaatccattgataaaacagttattaacctacctaagttaataaaaattaaaaatcaacttagggaatcttacataaaatggctagatataatgaatatctcaaatgtaagtagaaatatatcttttagggatgattttattcctatattaggaaatgaaacgatagagcaattaaaaggaagcactaaagtcagagcaatattagcttatagagcatcactaattgaaacaatagctattaattgtcaaaaaacatttgagtttattatacttgacaccccaaaacagcatgaaattcatcatgaagatatagataactttatgcgaaatatgaagctattatctgaaaattataaatttcaggttgttttttcatctactgaatatctattttcttgtgatgaaaatgattgtttatgggagccaaaatatccgggcgaaaaacataatatgttcttgaaaaataaataa

SEQ ID NO: 92538 - DNA, 951 bp, Providencia rettgeri Dmel1
gtgtttatcttcgaatatcatgatgatgttcttattcttgatgacgaagtttctccaactcaactcacatttgctcaagtaaaaacaagagagaaacactggactgcattcactctgagtaatagcacccagaagaaacccgtatctatcatcggtaagttatttattcatcataagaatttcgccgaatattcacctaagctcctttttgttactaatgcttctttcaatctatgtaaggaaaacggtggtaagtcttgttttggtgcaaatgaagtcaaagtggagtatcaggcgagctttaagaaagcgatcaaagatcaagtaaagcttgatgactccagtatcgatctttctgttatgcgattcgttcaatcctcattaagtctagatgaccacattacacatctaaaaggtaaattatgcaatttccttagcaagaagtttggcgatggcattagcctgaatgtcaatgcattagtgtctttacttgaacaatcgtgtcgagaaaaatccaaagtaaaatctgcagatattattaatttttctgaacttatctcgcgaaaaggtttctcatcaaaagcattgaacaatgtgcttgattccttgaatgtaagtaatagtttaaagcctgattgggacaaagctagccccctattcaatgatcttggcaaaacatcgcttcacctcattaccctacaagccatgttctcacaagtttgcatcgaccttaaccaaaatacaaaaaatccttcgactgtatatctagaatatgcaattagcctttacgatgaggcgagtgttcactcgaatttgaaaatatacgtagctgaaaccatgcacaaaattgatgcactttgtccagattatgcattgactttaaagtcagggaagaaagaatgtatcgttgtttactcaataatccagaaactatttgagggaggtgaataa

SEQ ID NO: 92539 - DNA, 1665 bp, Providencia rettgeri Dmel1
atgaaaagcatatactttaaaagtgctcacatattatctcttcgcgataagaaaggattctctttcaagttctcacctgatatcaatatcattacaggtgagaatgatacaggtaaatctagttttattaagagcttatatcatacattaggtgctgatattcggctggataaaaagtggaaagaagataacgttgtttcaaaagttgttatttgcgtcaataatcgtgactatgcgtttcttcgccacgaaaaacgtatttccattttcgatataacagaaggacaagagcatcacttagtgacctctagctctcgtacagagattgcattaactgtacgtgatatctttgatttcaatttggagcttgttactaaaagtagtttagttcagggacaagcacaaccagcaagtctttatctcccttattatattgatcaagataacggttggggaaaagtattagattcattcagcagtttggcaatgtataatgactggcaaaacaatatcttaaattttcatgccggtgtaaaaccaaaagagtattacactttacaaggaaagattaatttaattgatatcgatcttgatgaaatccgaacgacgttaaaagctctacagagagctaagaagcggttcgaagagtcatttggaagagtacttttcgatgtggatgtaaaatattatgaagagctgctggaacgtttccttcgtaaatgccaagacctacatcaagaagagacagaatacagaattaagctcataaaagtattatctctacgagatgaattagtagcagaaatcgaggagtcaaaaagacagctcgatgaaaatgatatagattcgttgctaccatcagcaggcttagaatctagatatgtagtacttgagaacaaagaaaagctattgcaaatcataccaaagttgtatgaggaaaagtctgtatatgatgatcaaatcactaaaatcaaagaagatttgaaaaatgctaaaaacctaagctcagaactcaaaagcatgcttcaggaagtcaaagagcaattgtctcttcaagacgttattaagtctcaagcaagtaaacaggttgaggtaacttttgatgagcaaattaacgaattactgttaaaaattggtgaattggatatcgctagaactgatctttcaaaagaaatagcaaagttcgaagataaaaagcgaacaaaagaaatcaatgataagtttaaagagtcactgaagtttgcacaaactgagttaggtatcaaagatcctaaagttggaactattcttcaatatggcccgatttctaagagcgaaacaggtagccgtgctccaaggtcaatattggcttatcactatgctcttctcaaaacaatagaagataaatcgacaagccctatgcttccagtagtaattgactcgcctaaacagcaagatccagatccgcgcacaacgaaaaagctatttgatttatgtattaatgggttatcaactaatagccagctaattattggctctgtttcatttgaaagagaaacgaatcagtttaaaacgcttattatgactgaaaaatacagtctgctaaaatcagagctttacaatcaggtttatcaagagattatgcctctttatcaacgagctgtgttatcacaatctgatcattaa

SEQ ID NO: 92540 - DNA, 1086 bp, Providencia stuartii
atgggtttagctgaagctttggttagtattccgcagtctgaaagaggcggtgagattgcgcaacgtgggtttgactatcaaacttgctgggctttatctcaaatgctggaatatgaactagatgaaaaaaactatgtgtttatcttcgaatatcatgatgatgttcttattcttgatgacgaagtttctccaactcaacttacatttgctcaagtaaaaacaagagagaaacactggactgcattcaccctaagtaatactacccagaagaaacccgtatctatcatcggtaagttatttattcatcataagaatttcgccgaatattcacctaagctcctttttgttactaatgcttctttcaatctatgtaaggaaaacggtggtaagtcttgttttggtgcaaatgaagtcaaagtggagtatcagacgagctttaaaaaagcgatcaaagatcaagtaaagcttgatgactcgagtatcgatctttctgttatgcgattcattcaatcctcattaagcctagatgaccacattacacatctaaaaggtaagttatgcaatttccttagcaagaagtttggcgatggcattagcctgaatgtcaatgcattagcgtctttacttgaacaatcgtgtcgagaaaaatccaaggtaaaatctgcagatattattaatttttctgaacttatctcgagaaaaggtttctcatcaaaagcattgaacagtgtgcttgattccttgaatgtaagtaatagtttaaagcctgattgggacaaagctagtcccctattcaatgatcttggcaaaacatcgcttcagctcattaccctacaagccatgttttcacaagtttgcatcgaccttaaccaaaacacaaaaaatccttcgactgtatatctagaatatgcaattagcctttatgatgaggcgagtgttcactcggatttgaaaatatacgtatctgaaaccatgcacaaaattgatgcactttgtccagattatgcattgactttaaattcagggaagaaagaatgtatcgttgtttactcaataatccagaaactatttgagggaagtgaataa

SEQ ID NO: 92541 - DNA, 1653 bp, Providencia stuartii
atgaaaagcatatactttaaaagtgctcacatattatctcttcgcgataagaaaggattctctttcgagttctcacctgatatcaatatcatcacaggtgagaatgatacaggtaaatctagttttattaagagcttatatcatacattaggtgctgatgttcggctggataaaaagtggaaagaagataattttgtttcaaaagttgttatttgtgtcagtaatcgtgactatgcgtttcttcgccacgaaaaacgtatttccattttcgatataacagaaggacaagagcatcacttagtgacctctagctctcgtacagagattgcattaactgtacgtgatatctttgatttcaatttggagcttgtgactaaaagtagtttagttcagggacaagcacaaccagcaagtctttatctcccttattatattgatcaagataacggctggggaaaagtattagattcattcagcagcttggcaatgtataaggactggcaaaacaatatcttgaattttcatgccggtgtaaaaccaaaagagtattacactttacaaggaaagattaatttaatagatatcgatcttgatgaaatccgaacgacgttaaaagctctacagagagctaagaagcggttcgaagagtcatttggaagagtgcttttcgatgtggatgtaaaatattatgaagagctgctggaacgttttcttcgtaaatgccaagacctacatcaagaagagacagaatatagaattaagctcataaaagtattatctctacgagatgaattagtagcagaaatcgaggagtcaaaaagacagctcgatgaaaatgatatagattcgtttttaccatcagcaggcttagaagctagatatgtagtacttgagaacaaagaaaagctattgcaaatcataccaaagttgtatgaggaaaagtctgtatatgatgatcaaatcactaaaatcaaagaagatttgaaaaatgctaaaaacttaagctcagaactcaaaggcatgcttcaggaagtcaaagagcaattgtctcttcaagacgttattaagtctcaagcaagtaagcaggttgaggtaactttcgatgagcaaattaatgaattactgttaaaaattggtgaattggatgtcgctagagctgagctttcaaaaaaaatagcaaagttcgaagataaaaagcgaacaaaagaaatcaatgataagtttaaagagtcactgaagtttgcacaaactgagttaggtatcaaagatcctaaagttggaactattcttcaatatggcccgatttctaagagcgaaacaggtagccgtgctccaagatcaatattggcttatcactatgctcttctcaaaacaatagaagataaatcgacaagccctatgcttccagtagtaattgactcgcctaaacagcaagatccagatccgcgcacaacgaaaaaactatttgatttatgtattaatgggttatcaactaatagccagctaattatcggctctgtttcatttgaaagagaaacgaatcagtttaaaacgcttattatgactgaaaaatacagtttgctaaaatcagagctttataatcaggtttatcaagagattatgcctctttatcaacgagctgcgttatcataa

SEQ ID NO: 92542 - DNA, 945 bp, Serratia marcescens
atggaatatcatgaagatgtaatcattgccgactctcttgataaagaaaaagttaagtttacgtttaatcaagtgaaagctaactcttcaggtagctatacgattaatagtttgactaagcgagataaagggaaaaatggcgaaaaaccctctcttttaggaaaactatgttcttccgttcataaaaaatgttatttgagtaaggtgacagaattaaatttcgtgagcacaataggtttcaatttttctcctaaagatgggttaaagttgagagctttaggtttttctgaactgaactcaggtgatttatcattaattacaaacaacctaaataaagagattgatgagtttgattccttcccaaaagaaataattagatttgtttactctgatataccacttcaaagttattatgagcacacaataacaagaattactgatagtgtcgaagtcgtattccctaaacatttattaaaaccaaaagacatttatagggttttaatggatgcacttagaatccgaggcaaagacacttttgattatgataaatgggatgaagtgcttgttaaaaaggcattaacctttgatgacatacataaagtagtgacaaacggtatatctggagaaaattcaggggtagatcttgaaaccgctaaatatgtcattaatgacttaactattaatggcttagaaaagggtaggctattaaaagaggttaaggcttatactttacgtgttttatctccttcactagcaatgctggaagctcaaaagagtatccaggaggttattgttaaaaaccgaaaccaaataggcgacaacataacgtacgattttcttcagagactcagcgttgaaattccagagagaacaaaatatatattagatacagaaagaatattgattgcagcaattatatacgaaattatttcgagtgaaatataa

SEQ ID NO: 92543 - DNA, 1668 bp, Serratia marcescens
atgagaaagttagttttagagaaaataacaataatatctcattcaacaaaatccgcgaggcaattcgagttcggaaggaacctgactctaataacagctgatgatggtaatagtgtcggaaaatcgacgttagctaaaatgattttctggtcatttggctgcgaacctttattttctagtgtttggaaggaacttgattgctcatccattatcaattttagtattgatggtgaatcaatttctattcaccgttataaaaatgaaatgagctttcgcaaacctggccagctattgaaggtttataataagatcactggtgcctttgccgagttattcgcagagttagtgaaatttgatgtgctattacctaaaaaaaacagttttaatttagagattcctcctccctcgtattattttttgcctttctatattgaccaaaaaagaacatgggtgaaaccatgggattctttttctaatctacagcaatatagtaagtgggcgcaacctgtaatatcgtttcatagcggtcttatttcgaaggaacactttgttgttgaggaagatatatatgaaattaaagcgaaagcggatgaggttgaaagtgatattaatgaattaaagaatgctgtcactattttaaaaaataatatcgcccatcaagattacactgcagattctgaaagtttagccgatgagatattaaagtacgaagagttaattaaacgtaacctagatgaatctgcaaacttaaaaattgagatagttgaccttgagtcgcaattaaaacttgctgaatccataattagcgaactggataaagattatattttttctgtagagaacatgaatgaaggaagcgttgaatgtcctacatgtggaacaatccatgaaaactctatagctcacagaagtagcattcttattgacaaagaaaaagctgaaaagcaatttactttgctattaaatgaaaaattacgcctgcaagataacttgactaatttagatagaatactattggggtttaaagaaaaattatcaaatgcgcagtcagcatttgaattaagtaactcgaaggcgttttcagagtttatgactaataatgtcgataagcagattgacgttatcgttgaaaaaaaatcagctgttctcgaaaaccaaaagttaaaagagaagggtttgaaaaaaactcagaaggatttaattacgaaggaacaaagaaatactataaaagaaaatttctccaatacattctttaagtacataactaaattaagagttaatatagatgcttctcttataaagagcccgctcgattacaacaaaatatatgaggttggaggggccgctgaagatgctcgagcggttttaggatattacttagctttatatgagcatatttcagaatatggtcatgaggtggttcctcctcttgttattgatacccccaatcaacaggaacaatctaccgagaactataataaaatagttgaggcgatagctagaggggttactgaaaacaagcaatacattatttgtgcaatgcaacacagtgcattggatactctttcaaaagatgcaaaagtcattcgtctggatgaaagaaaaatacttacagcttctgagtatgaagaagcaaaagacattgaagagcaatttctttttatatga

SEQ ID NO: 92544 - DNA, 948 bp, Serratia odorifera DSM 4582
atgatgttgttacgcgagtccattgaactaaacataagggagtatatggggttagctgaaacattagttagtattccgcagtctgaaagaggcggtgagattgctcaacgtgggtttgactatcaaacttgctgggctttatctcaaatgctggaatatgaactagatgaaaagaactatgtgtttatcttcgaatatcatgatgatgttcttattcttgatgacgaagtttctccaacacaactcacatttgctcaagtaaaaacaagagagaaacactggactgcatccactcttagtaatagcaccaagaagaaccccatatctatcatcggtaagttatttattcatcaaaagaatttcgccgaatattcacccaagctcctttttgttactaatgcttctttcaatctatgtgaggaaaacggtggtaagtcttgttttggtgcaaatgaagtcaaattggagtatcagacgagctttaagaaagcaatcaaagatcaagtaaagcttgatgactccagtatcgatctttctgttatgcgtttcgttcaatcctcattaagcctagatgaccacattacacatctaaaaggtaaactatgcgatttccttagcaagaagtttggcgatagcattagcctgagtgttaatgcattagcttctttgcttgaacaggcgtgtcgagaaaaatccaaggtaaaatccgcagatattattaattttcctgaacttatctcacgaaagggtttctcatcagaagcattgaatggtgtgcttgattccttgaatgcaagtaatagtttaaagcctgattgggacaaagctagtcccctattcaatgatcttggcaaaacatcgcttcagctcattatcctgcaagccatgttctcacaagtttgcatcgaccttaaccaaaacaaaaaaatccttcgactgtatatctag

SEQ ID NO: 92545 - DNA, 1653 bp, Serratia odorifera DSM 4582; identical to SEQ ID NO: 92479

SEQ ID NO: 92546 - DNA, 1086 bp, Yersinia enterocolitica (type O:5) str. YE53/03; identical to SEQ ID NO: 92478

SEQ ID NO: 92547 - DNA, 1653 bp, Yersinia enterocolitica (type O:5) str. YE53/03; identical to SEQ ID NO: 92479

SEQ ID NO: 92548 - DNA, 1128 bp, Yersinia enterocolitica
atgttgttacgcgagtccattgaactaaacataagggagtatatggggttagctgaaacattagttagtattccgcagtctgaaagaggcggtgagattgctcaacgtgggtttgactatcaaacttgctgggctttatctcaaatgctggaatatgaactagatgaaaagaactatgtgtttatcttcgaatatcatgatgatgttcttattcttgatgacgaagtttctccaacacaactcacatttgctcaagtaaaaacaagagagaaacactggactgcatccactcttagtaatagcaccaagaagaaccccatatctatcatcggtaagttatttattcatcaaaagaatttcgccgaatattcacccaagctcctttttgttactaatgcttctttcaatctatgtgaggaaaacggtggtaagtcttgttttggtgcaaatgaagtcaaagtggagtatcagacgagctttaagaaagcaatcaaagatcaagtaaagcttgatgactccagtatcgatctttctgttatgcgtttcgttcaatcctcattaagcctagatgaccacattacacatctaaaaggtaaactatgcgatttccttagcaagaagtttggcgatagcattagcctgagtgttaatgcattagcttctttgcttgaacaggcgtgtcgagaaaaatccaaggtaaaatccgcagatattattaattttcctgaacttatctcacgaaagggtttctcatcagaagcattgaatggtgtgcttgattccttgaatgcaagtaatagtttaaagcctgattgggacaaagctagtcccctattcaatgatcttggcaaaacatcgcttcagctcattatcctgcaagccatgttctcacaagtttgcatcgaccttaaccaaaacaaaaaaaatccttcgactgtatatctagaatatgcaattagcctttacgatgaggcgagtgctcactcggatttgaaattatatctaactgaaaccatgtacaaaattgatgcactttgtccagattatgcattgactttaaagtcagggaagaaagaatgcatagttatttactcaataatccagaagctcttagagggaggtgaataa

SEQ ID NO: 92549 - DNA, 813 bp, Yersinia enterocolitica
atgaaaagcatatactttaaaagtgctcatatattatcccttcgcgataagaaaggattctccttcaagttctcacctgatattaatatcattacaggtgagaacgacacaggtaagtctagctttattaagagcttatatcatacattaggtgctgatgttcgactggataaaaagtggaaagaagataactttgtttcaaaagttgttatttgtgttaataatcgtgactatgcgtttcttcgccacgaaaaacgtatttccattttcgatataacagcaggacaagagcatcacttagtgacctctagctctcgtgcagagattgcattagctgtgcgtgatgtctttgatttcaatttggagcttgtgactaaaactaatttggttcagggacaagcacaaccagcaagtctttatctcccttactatattgatcaagataacggttgggggaaggttttagattcatttagcagtttggctatgtatgaggactggcaaaaaaatatcttgaattttcatactggtgtaaaaccaaaggagtactatactttacaaggaaagattaatttaattgatatcgatcttgttgaaatccgaacgacgttaaaagctctaaagagagctaaaaagcgattcgaagagtcatttggaagagtacttttcgatgtggatgtaaaatattatgaagagctgctggaacgtttccttcgtaagtgccaagacttacatcaagaagaaacagaatacagaattaagctcataaaaatattatctctacgagatgaattagtaacagaaatagggtaa

SEQ ID NO: 92550 - DNA, 1128 bp, Yersinia enterocolitica; identical to SEQ ID NO: 92548

SEQ ID NO: 92551 - DNA, 1029 bp, Yersinia enterocolitica
atgaaaagcatatactttaaaagtgctcatatattatcccttcgcgataagaaaggattctccttcaagttctcacctgatattaatatcattacaggtgagaacgacacaggtaagtctagctttattaagagcttatatcatacattaggtgctgatgttcgactggataaaaagtggaaagaagataactttgtttcaaaagttgttatttgtgttaataatcgtgactatgcgtttcttcgccacgaaaaacgtatttccattttcgatataacagcaggacaagagcatcacttagtgacctctagctctcgtgcagagattgcattagctgtgcgtgatgtctttgatttcaatttggagcttgtgactaaaactaatttggttcagggacaagcacaaccagcaagtctttatctcccttactatattgatcaagataacggttgggggaaggttttagattcatttagcagtttggctatgtatgaggactggcaaaaaaatatcttgaattttcatactggtgtaaaaccaaaggagtactatactttacaaggaaagattaatttaattgatatcgatcttgttgaaatccgaacgacgttaaaagctctaaagagagctaaaaagcgattcgaagagtcatttggaagagtacttttcgatgtggatgtaaaatattatgaagagctgctggaacgtttccttcgtaagtgccaagacttacatcaagaagaaacagaatacagaattaagctcataaaaatattatctctacgagatgaattagtaacagaaatagaggaatcaaaaagacagctcgatgaaaatgatatagattctttgctaccatcggcaggcttagaagcgagatatgtagtacttgagaataaagaaaagctattgcaaatcataccaaagttgtatgaggaaaaatctgtatatgatgatcaactctctaaaattaaagaagatttgaaacaggctataagcttaagctcagaactcaaaaacatgcggtaa

SEQ ID NO: 92552 - DNA, 1170 bp, Yersinia enterocolitica
atggttcttgaaacagtaccaccaagggagcaatctggcagagattcattcgcccgctaccgtgctcaagttcgttcagcagcaattgcggctctacaaatgctgtctagtacgacgattgatcgtgtgtactgcgatttgcatgatgatgtagtcgttcgaaaaaaagacgaaaatggtctgacctatgtgttttatcaggttaaaactagggcaaaacaaaataagaactggacattgggtgaagttttcggaattcaacctaaaaaaaatacaatttgcgacaagtccattaaagaaagttttgtagggaaaatgctactccacactataatattcgatcgacattgtaactcagtgattttccagacaaatattcacaatgatgataacattgaagatctgctctctgatatagaaaatggtatatatgcaaacaagttcagtcgtatttttttagagcgattcaacaatatatatcctaatgaaatagccactcccttatcagaaaatgaaataaaagaacgcttatctaagttaaaatttgaaaatgacgttcattatttaaaagatgactcatcatacttcgcgcctttggctagagagagaatatatcaatatagcgagattgatcttactcacattgagtctaacgacatcataattaaattactggagcttatctcaagtaagtcctctggtgtaattaaaccattcactaaagaatcaattgaaaactctgctgctgtttcaatcaatgatttattaccactccttagtctctctaaagaagcctatgaacaaattttgcaaggcggagaccctaaagcgataaaatcagtttcaatcattcagcgaacactattaagtgctggggcaagtttagaagatgtaacattctgctctaaatgcaaaaccgaatgggatgtttggtatagaaacaatagacacaatatgtcagaaatagacctaaggtttattgtaaataaagtaagagagttgttgagaaatgttcagtcaagcaaagaccaatcactcacactcggtaacctttacactccacttaaacaattattgacggagttaaaatctcttgagttggaatttgatttaacaacagaaatgctgtttggagcagtattttcagagcttgtgaaaggtgggatatga

SEQ ID NO: 92553 - DNA, 1788 bp, Yersinia enterocolitica
atgagattattaaaattaaaaatatttcctaaaggtcgtgatggttggatgtccgaggaattaattttcgctgagcatataactcaaatatttgggcccaatgggtgtggtaaaacaccagttgtacaatcaatatcgtattgcttaggctatccaaatgtatttagaaatgatatttacgaaagatgtagtcatgcaattttacatgtgactacagcaaaaggagagtatcaattcaaaaggtattatgagaaggatcaattacacattaatattactgaaccaaatggtgtaattcaaacgttttacgatgaggcaagccatagtgaatttatctttgatctaatggattttaatgtaaaccagttggttacaataaatagcaaggcgacatccccatatctatcattattacttcctattttctatttagatcaagatgatggctatgggaaaatatatagtccgcccaaaaatttcattaaagatcagttctctgagattgtcagaatggcattccgattgcctccaagaaactcagtagatgaaaaacgagagaaaaaaactgccaaagataatttagacaatctagacagggtagttcaacttcttgaacggcaagtagaagctgtaaaaataaaatcccccgagattaataaaacaccagcacagctcaggtctgaaattcaagatttagaaatagagttagagcagcttaaaggggctggtaacagtcatgatgattctattggaatctatgatcgattgatatccaatcaccgaacagaaattcgcgatcttgaagtacaaattgctgagatattaaaacgacaaaatggaatacaaaaaataattgctgatatcaatactgaaattgaaactttaagtcttaatgagggtgccaagagaatttttttgtcattcgatgagatctgcggctcaaataattgtcagcttttctctctgagctcaaattcctacagtaaaaacttactatatctcaaagaccaattgaaagacttggaacggaatagagtttctgactctgtcacattaactcacttacaaaaaacaaagctaaattatataaccatccttcaagctatcattgatgaacgaaatgcctcaattcaaagaccagaattagcaactttagttgatgctatatctagaataaaaaataaagtatttgaacttcaaacacaactcagtgagatagaacatatattattattagaagacaggttgttcactaaaatcactgagcgcaactatgcttttgaaaaacacaaaggactaactggaacacgatctacatctccagaactgatgaagatcaaacttgaattgaaagagctgttcattaattggctagattctatacacacaacgaatataagtaaggatatcacttactctgatgatttcactccaaaacttggggccgaaaacataacacaactaaaaggtagtactcgaatcagaactgttttagcatatcatgcagctttaattgaactcctcatgcaacgaccgaaagaaaattttagatttatcattctcgacacccccaaacaacatgatatagaaaataaagacttagacagttatataaagactttaaaagtgctagcgggattgaaaaatgtccaaataatattttccacaactggataccattataacggcgatcaggatgataaagaatggaacccaaaattcccgggggatgatcatttaatgttttttaaaaaaaatgacaatttagacattaaaagcatctcataa

SEQ ID NO: 92554 - DNA, 1089 bp, Yersinia enterocolitica
atgtcagaaagcgtcaactcaggagttgaaggtggctcaggttatacgtttcaaagatgttgtgttgtatacctcctttttgatgagtatcaaaaactaaactcaccctcaatagactatttcatatgtgttgagcatcatgaggactttctttttacttatattgatgaaaatggcattattaatagtattgatacttttcaagcaaaaaaatcacgagatgattggaaaacggatcaagcgttttgcgaaattataggaaaaatatctcttgtaggaaatgaacttatcaatgacaggcatcccaagtcagaaaattataaacataccctatctttcctgacaaatagaaacattgttcttcagggtaaaaagaacaaagataaaaagcagataactgaaaaaatccagatatcaaatatctctaaaaactatccagaactgcatagtgaaattaaagagaatattcaatcaaaactaatcgatgggaaaatcgcagatttcaatcaattatcgaatgtgaaatttagttttattgatctcccgcagaaccataaaggatggaagagagttttaactggtttgtcaacagaagttttgggatgtaaagttaacgatcatgaagcagtaataacaacattaatggctctactacaagatgtagaattaacatataataacgccggatatgttttgcttgcagataaatcaaagcgtcttactaaacaaaaaatagactctacatttgatattttcacagaaagcaaaaaagcctttagcttctggcgaactcatgcagatgatttagcaaaaggattagaaataaaactccctataaaaagaagagcacaggagttattagacaactgttttgatttatttaaagatatacaacaagtagaatacaaaaaaatctataagtttgtatctgaaaacacctatatcgatgaaaagcatataaatgaggccgagtgtattacagagctatatcagatgtatattagctcatataactcaaggttagaaaaacatatgattgcttttgcaattatagctgcatatgtagaaacaagaggaatgtatgtctaa

SEQ ID NO: 92555 - DNA, 1758 bp, Yersinia enterocolitica
atgtctaagttaatcctgaaaaatatactagcgtattctataaatggcaacggaatttttagcactgaatttggggaatcagttaatataatacatggtagaaacacctcaggtaaaagcacattaatgcaatcaatcctttattcaatgggagttaatgattcaaaggaaaacctgaatgatataatcagtgagaatgtcatttttcgccttgaatgtgaaatgcaaaatataaatacattcgaaaaaattgtttttgttcgcttagacgatacccttgttgttcgtattgcagataatccccccatacggtttgatggcatcaatggaaataattcatttgaatacggaaggtataaagaattatttaataagttatttgatttcaaactaatattacaaaaacaggctaatttcaccaatgcaccaattgaggcagcatttttaccattctacatatctcaatcagttggatgggtttatctaagagaatcgataggcgattaccggttttataaagattttaaatttgactatctcgactattacactggactaaaaaatcgtacagatagattgaagaaatacactctgaaaaaagaaaaacagcaacttgaatatgagcggagtcaattgattaaatataaatcaaaagataactctctgaaactatcagaaacattagaaactcgatttaaaggaaaggctcttgattacttaaagagttatgatcaattagcaacaacattaatttcagaagaagctaatcatgataaattatgtaataaattaagtatgcttcgtgggcgtgaaaaagtacttttacaaactatccgaaatttaaagctacaaaaaccaagagtagacagatgccctgtatgcgaacaaacattacccggcgacatcagagagttatatatatatactcaagatatcaatgatgctttaagagagaaggagataacctctgataaaatcaagacaatatcagcatcattaaactctgttgaaaaaaaaataaaagatagtagtgggataataaacaatgaatatagggtattgaaagaatctagagttgaaagtataggatttgagagttggataaatcatcatgctaacatcactattttaggtgaaattaaaaataaagaaagagattatgatgaaaagatatcaggcttgcaaacaaatatagataacctagcaaatgacgcagaaattgacacccttcgttatggaatagaaaaggaattccttgggatattccaagagaaagccaaatgtctagaagtaaagataccagatagttcgagatataaaaacctgtactcaattacatctttcccttatcaaggtgtagaattacataaaataattatggcctaccatttttcattttatcaattaataagtaaaagaaccacaattcataaatttccttttttattagatgctgtatttaaagaggatattgatgttggaaatagagaaataatatttaattttctttcaagcgaagcaaaaaatcacgaacaaatattattttctgtagctgaatataaaaaagaaaagaatccaacagaaggggatcctcttttcaacattaatgaaataaataatcgctatttttctggaagtgcaaagcaaatttgtataggaaacgcaaaaactgtaagatcgttcttgcttcagaaaagtttaaacgaagacgaacaatttttattagacgatgcattttctctgctacaaaccatataa

SEQ ID NO: 92556 - DNA, 1086 bp, Yersinia intermedia
atggaaagtaatattttaggtcatgctcagagagaaacttcaggagcaactacatttggaaaatataatttccaatatcattgggctttatgcagaataattgaaaaacataaatccaatgcagactatgcattattaattgaatatcatgaggatgtcgttatcgcagactcattgtttggcagttcggcgaaatttgaattttttcaagtgaaaaatactgggaattccttcactgttgactctttaactaaacgagtaaaaggtgcagagggacttaagaactccattctaggaaaactattaagctcatgtataggcactgagtatgaaacacgtattacggaaataggtcttgtatccgctagtggcttctcatttgatcagaaagataataagttaaagttagatattataacttcgggtgatcttagcgtggattgtctatcgggcttaactgggaaattaaagtccgagcttgggatagatatttttccagaaaatctaaagttcatcattccaaaaataaagttagaaaatcaagaagaattcgttattgccagatttgctgaattagtaaatgaaatatttccaaatagtcattgtaatgctgtcaatatttatagggcaattatcgacgagattcatcgcaaaggacagaatacttacgactttactatgtgggagaaaatggtagaggataagtctctcacatctcatacggtaaaagatgtcatagctgtaaatacaacgagtccaaaatttgaagactttgagaaagactttgagtatttagctaaaagcgatatgaaatggaataccttaacatatcgaaagatggtaaaaaaaataaaacaaatttacttacgtagagtcgggtatgcttcagcttttgatatgaatataatgagaatagctcaacaggcgctcagtaatgttccggaagaagactatactgaaacaagcgattacattaaggcagttgttatgaaagctaaacagctgaatattgaaagccaaatcccagaagatgatgatatactttgcgagataatttactgttttttgaaggtgatgcatgaataa

SEQ ID NO: 92557 - DNA, 1734 bp, Yersinia intermedia
atgagaagcttgcaatttcaacgattggttctgatatcagattcgaaaagacttgcgaatcagttcacgttcccgaagagattgaatctaattacaggagaagataacagtatcggcaagtccactctagccaagagtttactatggtcgctaggatgcgatccagttatcgacgaagaatggaaatcaaatgacattaaatcgatattatatttcactataaataataaagaatatttttcttgccgtggaagccactcaataattttgggcgctatcgatggtgaagcgaaaagatacacacatataactggtgatttttcacaagacctatcagatcttgttaactttaaaatgaagcttcctaatcggactgatgggaaattagagactcctccgccagcatattattttttaccattctatattgatcagataaaaagctggagttcaccttgggattcatttgaaaacttaggtcagtatgccaactggaaaaaatcgttaataaagtattttactggctatctgaaaccagaacattttgaattagaagaagaaatttatgaatatagtgaggtaaaaaaagaatcaacagcaaaaatagaaaaatttcaaagcgcagttgacgtcatagttgataattctgctgatatcaccatagcattagataatgagaaatttagcgaaattcagaaagagataaatactgagcttcaagagtttatcgattaccaaaggaggctttatgatgctcaggctacgattacctcaaatatatatgatctcgaaaaacagtatgaattagccaccagttctgcaaacgaactcgaagaagattataagtttgcggtcgaatctataccgacagatcatttagagtgcccattgtgtggtactcttcacgataactcactgactaacagagcattgcttctttcagagaaggattcgctacttgacgaggcaaactcaatagcatcagaaatagaggcgcttagatcctcattatttgagttaaatgaggtagctcaatttgctactaatgaaattgaaagaattaataagaagtatctcaccgatgacaatgcgggcgaaaaaacactcattacacaagtaattgatgctatttcgaaagaaaaggtctcaagaagtattcaagttaaaattgataatgaagatcttaaaatcagcaaagccaataactctgtcgccgaattgaaaaaagatcagagaaaacttctttcaaacaaggataaggaagaactgaattcttcttttatgtcaaagctattgggaaatattgaagcactaggatcaacaggagtaaatcttagcaaagtgaaatcacctactgattataaacagttacttggtggcggtgctgctgaggctgccaggggattgcttgcttatcaactctccgtactgcaacaaatacatagtgctaaaacttgcatagtgcctcctttcgtcattgatacacccaaccagcaagaacaggcggggcatcgttatgaaaccgtcatcaaagaactaatgcgcagtatcccagaggactatcagataatactgtgtgcaatggagaataatgcattaaatgaatttaaaaatgatgccaatgttattacattaaattctggaaagttattggattcttcccaatatgactctctaagatctgagtataaaaacattcaattggctgtaagagaaacgagggatgatgattaa

SEQ ID NO: 92558 - DNA, 1173 bp, Yersinia intermedia
atgaatgagttgcatgagattaagcctagagagcaagctggccgagatacgttagagagatataatgctcaagtaagagctgctagtattgcttgtttatcaattttagaaggaaaggatgttgtaagagtttactgtgaatttcatgatgattttgttattgaaaagaataagttaggtaaaattgcatattcttttgttcaagttaaaacgaaagataaattaagtgacatatggaagctaaatgatgtttttggcattctcactaggaatagtaaaaaaaaacctcagacagatgaaaaggttgttaatagctttatcggtaagctaatacagcatacagttaactttcctgaaacatgtgaaaatattatctttatgactaatacacatgttaacgaagatattgacgcggttgttactgatttattaaatgaagattttagtaataagcacacattatttttaattgaaaaattcaatggttttttttcacctgccttgagtttaactgatgagcaaattaaagttaatctcaagaaaattatcattaactctgatgttcaatatataaaaagccaaaataataattttgagtcattagcaaaagatgtgatttataagtatagcgagattgatcttcaatacgtggaagccaaagaaataattatttcacttcaatcattagttaactcaaaatcaagtgttaaaattaaatcagtcactaaggatagtcttttatctgctagtggtgttggaattgatgatttattaagtgtattaagtatatcaaaagtagcgtattacgaacttcttaaaggtggtgatgaaaaagcaattaaatcagcatctgttattgaacggatgttgcgaagagcaggtgcgaaggatgatgaagtagaatattgtgcaaagtgtaaaaccaaatgggatgggtggttgagaattaaccgacatattttacctgctattgatatcaccgttatagaaggatatataggcgatataatttcagagttgtcccgtggaaggaatatcgttagattaagccttcttagaactttgatgaataatcttatagataaattagaaaaagaaaagatagtttatgatttaaataatgacttaatttgcggtggcattttttcgcaactggttaggaatgaaaaatga

SEQ ID NO: 92559 - DNA, 1758 bp, Yersinia intermedia
atgaaacttgttagcttatttttaaaaggaagggctgtaagtggcttggagtcagaggttctcattttcgcaaaagaaataacagagctttttggccctaatggtagtggcaaaacaccgctgttacaatcagtagtttattgtctgggatatccttgtaaattccgcgatgatatttataacttttgtgaatatgctcagcttgaatttgaaatttctggtgagaaatatacatctagacgagattttaagcagaaagagttctatattagattggttggttccaatggtcaggttgaacattttcataatgaaataacttactcaaaatatattattggattattgaagcttccatatccatcattagttactattaaaaatgaacaaacacacccatacctgtcaacattacttcctatattctatgtagatcaagatgatggttactccagatattattctgcacataataattttataaaagatcagttttctgaaatgttaagagttatttttggtttgccagaaagaaactcgttcatttcaaaaaaagaactaattgatgctgaggcacaattagaataccttgataaggttttggtagttcagcgtagagaagttgaactagcaagaagtgaaataaatgtaaatagaaagctagaggatatagacttagccatctctaatttaaatagagagttaagcgatttaaaagatgatagcaataataaaaatgatgcattatctagcatgaatgtattaatatcatcgcacaaaaaaagaatcagaattttaaatgatgagcttgatgatattaatcgacggaaaattagtttagctaaaataaaagatgagataaatatagagataaatacgttaaatataaatgaggaagccaaacgggtattcaggtcattcaaagagatatgtccatcagatggatgtaagatgttttctcaaagctcagaaagttatggaaagaatcttctatatttgagagaccaaataaaagatatcgagagaaatattgagcttgatagtcattctgtcgataaaataaaaagtgagttagacacgactaaaaaactaatagaagaaattctagaaattagagatcagatagcaaaaagtgaagggatatcatcaattgttgaaacaatatccattataactgctaatatctttactctacagctagaaaaaagtgagttacagaaagttggaatgcttgaagaaaaatattttgaaaatttaaataaaagagagttggctcaagatagagttgaaactttaaagaaaggtaagggtattatacctagagtaacaaagctaaaaatagaccttaaactagcttatattaaatggctagagatattaaatactctgaatatagataaaaatataacgtttaaagatgatttttatcctaatctaggtagtgaagtactaacgcaacttaaaggaagtactcgagttagagctattcttgcttataaggctgcattagtggaacttatgtgtgtaggtgataaaatgccatttaaatttataatattcgacacaccaaaacagcatgaaacacattacgaagatattgataaattcatgaatgaactgaaagttttatcaatgaaatatggttttcaagttgtgttctcctcgactgaatataagtatgtaggagattcaaatgatatgatttgggaacccaaattccctggtgaagagcatgagatgttcttagaacgtaactaa

SEQ ID NO: 92560 - DNA, 1089 bp, Yersinia pestis KIM10+
atggatagtgaagacacatctgacaatcccttgtccgaaccgcaaagagagtccgcaggggcccagtcctatgatcgatttgaataccaatatcattgggctctttgtaaagcattcagttcatacaaagaaagcaatgactttgcaatcttcatggaatatcatgaagatgttgtctatgcgaattctatagataaaaataaagttaaatttactttcaatcaaattaaagccaatgcaaagaaaacttatactgcaaaagtattaaccaagcgagagaatggtacaaaaccatctcttttagggaagctttgtagttcagttagcgacaaaaaatactttgaaaaggttgaaaaattagattttataactacaagtggattcaacctcactaaaaacaacaagttaaacttggcttcatataaactgtctagcttaagtagtgatgaggctagtgaaattataaaatgcctaagtgatgagctcgctaacttcggaaagtttccgcaagaaataatacacttcactacctctgacatccctctagaaagctattatgagcatacaatatcaaggatcactgatagcgtcgaagaagtgtatccacaacatctacttcgtacgaaagatatttatagaatattaatggactcattacgcatcagagggaagaacgtttttgactatgaaaattggaatgatgctcttactaaaaaagcactgacctataaagatatccatacggtagtaaccaaaatagtctcaaaaggtaattccgatttaaattttgaagcaataaaatacatattagatgatctaaatttaaagggcacgattaaggcaaaaataatacaaaaaataaattcatattcactaaccctactctcaccgacccttgcaattatcaaagcccaaaaagaaatacaagagttacttaaaaagaactctaaaaaaattgaaattgaaatgtcttatgaattgctcgaaaggctaatcatagacttatcaaaagatactattggtttgtttgaggataatatttctatatcatctgcgatcatttacgaaatggtagaggcaacaaactaa

SEQ ID NO: 92561 - DNA, 1491 bp, Yersinia pestis KIM10+
atgaaaaaattaatactaaagaagatcatgatactctcagattcaggaaaatccgcgaggcaattcgagttcggagagcatctaacactgataacagcagatgatgataatagcgtagggaaatctacgcttgcaaaaatgattttttggacttttggctgtgagcccattttttccgaggtttggagaacattagactgtacatcaattatagagtttgagataaataatgcaccttacattattcatagatataaaaatgaaattaaaattaggcatagcaatggtaaactacacagtttcccaaaaataaccggtgattattcaaagtatttttcagaacttgttaattttaatgtattactccctaagaaaggtcaattaacactagaaacccctccacctgcatattacttcatacccttttatattgaccaaaaaagaacatgggctaaaccttgggatagtttcgagaatcttcagcaatatagtagctgggcaaaaccagtcatctcctaccactcaggattatttataaaagcacactttgaagttgaaaaagatatttatgtaataaaaagagagttagaagaagttgagaaaggcgttactgaactgaataatgcagttataatactcaggcaaaaccttatcgatacagacaatgtacttccttcgaccgagtttatttttagtgttatacaagaatcagaaaaaaacaaaaaaaaccttcttgaagaaagaactaacttaagagttgaaaaaatacgacttgagtcgcaaatcaaattagccaaagggattattagtgagctagataaagattatattttttccgtcgaaaacatggaagatggtgacatagagtgcccaacatgtggaacaatacatgaaaattctatagcacatcgcactagcattttgattgatatggaacttgcaaaaaaccaactcgaatccttagagtcagaagtcaacggaataataaatttgctagttataaaagatgaggagattacagagcaaagcaataagagcgaacgaagttataataatgtcattgaaagtgactccaattcgttaatatcattcaccaatgataagtttgaaaaacgcgcacacgaaataaatagtaaaaaaaatataaccattgaaattaaaaaatcagaagaaaaaacagcaaaaaaatctcaaagtgacatactatccaaggaacaaaaaagtgaaataaagcaaagcttcgcagatagattatcgaaatacataacaaaattaaaagttaacgttgacatatctaaaataaaaagccctcttgattataaaaaaatatatgaagtaggcggtgcagcagaagatgcaagggctgtccttggttattatttagcaatttatgaacaagtagcggactcatgtgaagaagcattgccacctttggttattgataccccaaaccaacaagaacaagcaaggggaattataccaacattataa

SEQ ID NO: 92562 - DNA, 1089 bp, Yersinia pestis biovar Microtus str. 91001
atggatagtgaagacacatctgacaatcccttgtccgaaccgcaaagagagtccgcaggggcccagtcctatgatcgatttgaataccaatatcattgggctctttgtaaagcattcagttcatacaaagaaagcaatgactttgcaatcttcatggaatatcatgaagatgttgtctatgcgaattctatagataaaaataaagttaaatttactttcaatcaaattaaagccaatgcaaagaaaacttatactgcaaaagtattaaccaagcgagagaatggtacaaaaccatctcttttagggaagctttgtagttcagttagcgacaaaaaatactttgaaaaggttgaaaaattagattttataactacaagtggattcaacctcactaaaaacaacaagttaaacttggcttcatataaactgtctagcttaagtagtgatgaggctagtgaaattataaaatgcctaagtgatgagctcgctaacttcggaaagtttccgcaagaaataatacacttcactacctctgacattcctctagaaagctattatgagcatacaatatcaaggatcactgatagcgtcgaagaagtgtatccacaacatctacttcgtacgaaagatatttatagaatattaatggactcattacgcatcagagggaagaacgtttttgactatgaaaattggaatgatgctcttactaaaaaagcactgacctataaagatatccatacggtagtaaccaaaatagtctcaaaaggtaattccgatttaaattttgaagcaataaaatacatattagatgatctaaatttaaagggcacgattaaggcaaaaataatacaaaaaataaattcatattcactaaccctactctcaccgacccttgcaattatcaaagcccaaaaagaaatacaagagttacttaaaaagaactctaaaaaaattgaaattgaaatgtcttatgaattgctcgaaaggctaatcatagacttatcaaaagatactattggtttgtttgaggataatatttctatatcatctgcgatcatttacgaaatggtagaggcaacaaactaa

SEQ ID NO: 92563 - DNA, 1671 bp, Yersinia pestis biovar Microtus str. 91001
atgaaaaaattaatactaaagaagatcatgatactctcagattcaggaaaatccgcgaggcaattcgagttcggagagcatctaacactgataacagcagatgatgataatagcgtagggaaatctacgcttgcaaaaatgattttttggacttttggctgtgagcccattttttccgaggtttggagaacattagactgtacatcaattatagagtttgagataaataatgcaccttacattattcatagatataaaaatgaaattaaaattaggcatagcaatggtaaactacacagtttcccaaaaataaccggtgattattcaaagtatttttcagaacttgttaattttaatgtattactccctaagaaaggtcaattaacactagaaacccctccacctgcatattacttcatacccttttatattgaccaaaaaagaacatgggctaaaccttgggatagtttcgagaatcttcagcaatatagtagctgggcaaaaccagtcatctcctaccactcaggattatttataaaagcacactttgaagttgaaaaagatatttatgtaataaaaagagagttagaagaagttgagaaaggcgttactgaactgaataatgcagttataatactcaggcaaaaccttatcgatacagacaatgtacttccttcgaccgagtttatttttagtgttatacaagaatcagaaaaaaacaaaaaaaaccttcttgaagaaagaactaacttaagagttgaaaaaatacgacttgagtcgcaaatcaaattagccaaagggattattagtgagctagataaagattatattttttccgtcgaaaacatggaagatggtgacatagagtgcccaacatgtggaacaatacatgaaaattctatagcacatcgcactagcattttgattgatatggaacttgcaaaaaaccaactcgaatccttagagtcagaagtcaacggaataataaatttgctagttataaaagatgaggagattacagagcaaagcaataagagcgaacgaagttataataatgtcattgaaagtgactccaattcgttaatatcattcaccaatgataagtttgaaaaacgcgcacacgaaataaatagtaaaaaaaatataaccattgaaattaaaaaatcagaagaaaaaacagcaaaaaaatctcaaagtgacatactatccaaggaacaaaaaagtgaaataaagcaaagcttcgcagatagattatcgaaatacataacaaaattaaaagttaacgttgacatatctaaaataaaaagccctcttgattataaaaaaatatatgaagtaggcggtgcagcagaagatgcaagggctgtccttggttattatttagcaatttatgaacaagtagcggactcatgtgaagaagcattgccacctttggttattgataccccaaaccaacaagaacaagcaagcgggaattataccaacattataaaatcaatttctgacggcataaataatgataggcaatatgttatatgtgccatggaacacaaagccttagagcaaataaaaacaaatgctcaagtaattaaattagacgcaagaaaaatactattacaagatcaatacgagaaaatttcaaaactgcgaaatgaagttattttcgattga

SEQ ID NO: 92564 - DNA, 1089 bp, Yersinia pestis CO92; identical to SEQ ID NO: 92562

SEQ ID NO: 92565 - DNA, 1671 bp, Yersinia pestis CO92; identical to SEQ ID NO: 92563

SEQ ID NO: 92566 - DNA, 1089 bp, Yersinia pestis Nepal516; identical to SEQ ID NO: 92562

SEQ ID NO: 92567 - DNA, 1671 bp, Yersinia pestis Nepal516; identical to SEQ ID NO: 92563

SEQ ID NO: 92568 - DNA, 1089 bp, Yersinia pestis Antiqua; identical to SEQ ID NO: 92562

SEQ ID NO: 92569 - DNA, 1671 bp, Yersinia pestis Antiqua; identical to SEQ ID NO: 92563

SEQ ID NO: 92570 - DNA, 1089 bp, Yersinia pestis Pestoides F; identical to SEQ ID NO: 92562

SEQ ID NO: 92571 - DNA, 1146 bp, Yersinia pestis Pestoides F
atgaaaaaattaatactaaagaagatcatgatactctcagattcaggaaaatccgcgaggcaattcgagttcggagagcatctaacactgataacagcagatgatgataatagcgtagggaaatctacgcttgcaaaaatgattttttggacttttggctgtgagcccattttttccgaggtttggagaacattagactgtacatcaattatagagtttgagataaataatgcaccttacattattcatagatataaaaatgaaattaaaattaggcatagcaatggtaaactacacagtttcccaaaaataaccggtgattattcaaagtatttttcagaacttgttaattttaatgtattactccctaagaaaggtcaattaacactagaaacccctccacctgcatattacttcatacccttttatattgaccaaaaaagaacatgggctaaaccttgggatagtttcgagaatcttcagcaatatagtagctgggcaaaaccagtcatctcctaccactcaggattatttataaaagcacactttgaagttgaaaaagatatttatgtaataaaaagagagttagaagaagttgagaaaggcgttactgaactgaataatgcagttataatactcaggcaaaaccttatcgatacagacaatgtacttccttcgaccgagtttatttttagtgttatacaagaatcagaaaaaaacaaaaaaaaccttcttgaagaaagaactaacttaagagttgaaaaaatacgacttgagtcgcaaatcaaattagccaaagggattattagtgagctagataaagattatattttttccgtcgaaaacatggaagatggtgacatagagtgcccaacatgtggaacaatacatgaaaattctatagcacatcgcactagcattttgattgatatggaacttgcaaaaaaccaactcgaatccttagagtcagaagtcaacggaataataaatttgctagttataaaagatgaggagattacagagcaaagcaataagagcgaacgaagttataataatgtcattgaaagtgactccaattcgttaatatcattcaccaatgataagtttgaaaaacgcgcacacgaaataaatagtaaaaaaatataa

SEQ ID NO: 92572 - DNA, 1089 bp, Yersinia pestis D106004; identical to SEQ ID NO: 92562

SEQ ID NO: 92573 - DNA, 1671 bp, Yersinia pestis D106004; identical to SEQ ID NO: 92563

SEQ ID NO: 92574 - DNA, 1089 bp, Yersinia pestis D182038; identical to SEQ ID NO: 92562

SEQ ID NO: 92575 - DNA, 1671 bp, Yersinia pestis D182038; identical to SEQ ID NO: 92563

SEQ ID NO: 92576 - DNA, 1089 bp, Yersinia pestis Z176003; identical to SEQ ID NO: 92562

SEQ ID NO: 92577 - DNA, 1671 bp, Yersinia pestis Z176003; identical to SEQ ID NO: 92563

SEQ ID NO: 92578 - DNA, 1089 bp, Yersinia pestis CA88-4125; identical to SEQ ID NO: 92562

SEQ ID NO: 92579 - DNA, 1671 bp, Yersinia pestis CA88-4125; identical to SEQ ID NO: 92563

SEQ ID NO: 92580 - DNA, 1089 bp, Yersinia pestis Nepal516; identical to SEQ ID NO: 92562

SEQ ID NO: 92581 - DNA, 1671 bp, Yersinia pestis Nepal516; identical to SEQ ID NO: 92563

SEQ ID NO: 92582 - DNA, 1089 bp, Yersinia pestis biovar Orientalis str. India 195; identical to SEQ ID NO: 92562

SEQ ID NO: 92583 - DNA, 1671 bp, Yersinia pestis biovar Orientalis str. India 195; identical to SEQ ID NO: 92563

SEQ ID NO: 92584 - DNA, 1089 bp, Yersinia pestis biovar Orientalis str. PEXU2; identical to SEQ ID NO: 92562

SEQ ID NO: 92585 - DNA, 1671 bp, Yersinia pestis biovar Orientalis str. PEXU2; identical to SEQ ID NO: 92563

SEQ ID NO: 92586 - DNA, 1089 bp, Yersinia pestis Pestoides A; identical to SEQ ID NO: 92562

SEQ ID NO: 92587 - DNA, 1671 bp, Yersinia pestis Pestoides A; identical to SEQ ID NO: 92563

SEQ ID NO: 92588 - DNA, 1089 bp, Yersinia pestis KIM D27; identical to SEQ ID NO: 92560

SEQ ID NO: 92589 - DNA, 735 bp, Yersinia pestis KIM D27
atgaaaaaattaatactaaagaagatcatgatactctcagattcaggaaaatccgcgaggcaattcgagttcggagagcatctaacactgataacagcagatgatgataatagcgtagggaaatctacgcttgcaaaaatgattttttggacttttggctgtgagcccattttttccgaggtttggagaacattagactgtacatcaattatagagtttgagataaataatgcaccttacattattcatagatataaaaatgaaattaaaattaggcatagcaatggtaaactacacagtttcccaaaaataaccggtgattattcaaagtatttttcagaacttgttaattttaatgtattactccctaagaaaggtcaattaacactagaaacccctccacctgcatattacttcatacccttttatattgaccaaaaaagaacatgggctaaaccttgggatagtttcgagaatcttcagcaatatagtagctgggcaaaaccagtcatctcctaccactcaggattatttataaaagcacactttgaagttgaaaaagatatttatgtaataaaaagagagttagaagaagttgagaaaggcgttactgaactgaataatgcagttataatactcaggcaaaaccttatcgatacagacaatgtacttccttcgaccgagtttatttttagtgttatacaagaatcagaaaaaacaaaaaaaccttcttga

SEQ ID NO: 92590 - DNA, 1089 bp, Yersinia pestis biovar Medievalis str. Harbin 35; identical to SEQ ID NO: 92562

SEQ ID NO: 92591 - DNA, 1671 bp, Yersinia pestis biovar Medievalis str. Harbin 35; identical to SEQ ID NO: 92563

SEQ ID NO: 92592 - DNA, 1089 bp, Yersinia pestis A1122; identical to SEQ ID NO: 92562

SEQ ID NO: 92593 - DNA, 1671 bp, Yersinia pestis A1122; identical to SEQ ID NO: 92563

SEQ ID NO: 92594 - DNA, 1089 bp, Yersinia pestis PY-02; identical to SEQ ID NO: 92562

SEQ ID NO: 92595 - DNA, 1671 bp, Yersinia pestis PY-02; identical to SEQ ID NO: 92563

SEQ ID NO: 92596 - DNA, 1089 bp, Yersinia pestis PY-05; identical to SEQ ID NO: 92562

SEQ ID NO: 92597 - DNA, 1671 bp, Yersinia pestis PY-05; identical to SEQ ID NO: 92563

SEQ ID NO: 92598 - DNA, 1089 bp, Yersinia pestis PY-06; identical to SEQ ID NO: 92562

SEQ ID NO: 92599 - DNA, 1671 bp, Yersinia pestis PY-06; identical to SEQ ID NO: 92563

SEQ ID NO: 92600 - DNA, 1089 bp, Yersinia pestis PY-07; identical to SEQ ID NO: 92562

SEQ ID NO: 92601 - DNA, 1671 bp, Yersinia pestis PY-07; identical to SEQ ID NO: 92563

SEQ ID NO: 92602 - DNA, 1089 bp, Yersinia pestis PY-08; identical to SEQ ID NO: 92562

SEQ ID NO: 92603 - DNA, 1671 bp, Yersinia pestis PY-08; identical to SEQ ID NO: 92563

SEQ ID NO: 92604 - DNA, 1089 bp, Yersinia pestis PY-09; identical to SEQ ID NO: 92562

SEQ ID NO: 92605 - DNA, 1671 bp, Yersinia pestis PY-09; identical to SEQ ID NO: 92563

SEQ ID NO: 92606 - DNA, 1089 bp, Yersinia pestis PY-10; identical to SEQ ID NO: 92562

SEQ ID NO: 92607 - DNA, 1671 bp, Yersinia pestis PY-10; identical to SEQ ID NO: 92563

SEQ ID NO: 92608 - DNA, 1089 bp, Yersinia pestis PY-13; identical to SEQ ID NO: 92562

SEQ ID NO: 92609 - DNA, 1671 bp, Yersinia pestis PY-13; identical to SEQ ID NO: 92563

SEQ ID NO: 92610 - DNA, 1089 bp, Yersinia pestis PY-16; identical to SEQ ID NO: 92562

SEQ ID NO: 92611 - DNA, 1671 bp, Yersinia pestis PY-16; identical to SEQ ID NO: 92563

SEQ ID NO: 92612 - DNA, 1089 bp, Yersinia pestis PY-01; identical to SEQ ID NO: 92562

SEQ ID NO: 92613 - DNA, 1671 bp, Yersinia pestis PY-01; identical to SEQ ID NO: 92563

SEQ ID NO: 92614 - DNA, 1089 bp, Yersinia pestis PY-03; identical to SEQ ID NO: 92562

SEQ ID NO: 92615 - DNA, 1671 bp, Yersinia pestis PY-03; identical to SEQ ID NO: 92563

SEQ ID NO: 92616 - DNA, 1089 bp, Yersinia pestis PY-04; identical to SEQ ID NO: 92562

SEQ ID NO: 92617 - DNA, 1671 bp, Yersinia pestis PY-04; identical to SEQ ID NO: 92563

SEQ ID NO: 92618 - DNA, 1089 bp, Yersinia pestis PY-11; identical to SEQ ID NO: 92562

SEQ ID NO: 92619 - DNA, 1671 bp, Yersinia pestis PY-11; identical to SEQ ID NO: 92563

SEQ ID NO: 92620 - DNA, 1089 bp, Yersinia pestis PY-12; identical to SEQ ID NO: 92562

SEQ ID NO: 92621 - DNA, 1671 bp, Yersinia pestis PY-12; identical to SEQ ID NO: 92563

SEQ ID NO: 92622 - DNA, 1089 bp, Yersinia pestis PY-15; identical to SEQ ID NO: 92562

SEQ ID NO: 92623 - DNA, 1671 bp, Yersinia pestis PY-15; identical to SEQ ID NO: 92563

SEQ ID NO: 92624 - DNA, 1089 bp, Yersinia pestis PY-25; identical to SEQ ID NO: 92562

SEQ ID NO: 92625 - DNA, 1671 bp, Yersinia pestis PY-25; identical to SEQ ID NO: 92563

SEQ ID NO: 92626 - DNA, 1089 bp, Yersinia pestis PY-29; identical to SEQ ID NO: 92562

SEQ ID NO: 92627 - DNA, 1671 bp, Yersinia pestis PY-29; identical to SEQ ID NO: 92563

SEQ ID NO: 92628 - DNA, 1089 bp, Yersinia pestis PY-32; identical to SEQ ID NO: 92562

SEQ ID NO: 92629 - DNA, 1671 bp, Yersinia pestis PY-32; identical to SEQ ID NO: 92563

SEQ ID NO: 92630 - DNA, 1089 bp, Yersinia pestis PY-34; identical to SEQ ID NO: 92562

SEQ ID NO: 92631 - DNA, 1671 bp, Yersinia pestis PY-34; identical to SEQ ID NO: 92563

SEQ ID NO: 92632 - DNA, 1089 bp, Yersinia pestis PY-45; identical to SEQ ID NO: 92562

SEQ ID NO: 92633 - DNA, 1671 bp, Yersinia pestis PY-45; identical to SEQ ID NO: 92563

SEQ ID NO: 92634 - DNA, 1089 bp, Yersinia pestis PY-48; identical to SEQ ID NO: 92562

SEQ ID NO: 92635 - DNA, 1671 bp, Yersinia pestis PY-48; identical to SEQ ID NO: 92563

SEQ ID NO: 92636 - DNA, 678 bp, Yersinia pestis PY-53
ttggcttcatataaactgtctagcttaagtagtgatgaggctagtgaaattataaaatgcctaagtgatgagctcgctaacttcggaaagtttccgcaagaaataatacacttcactacctctgacattcctctagaaagctattatgagcatacaatatcaaggatcactgatagcgtcgaagaagtgtatccacaacatctacttcgtacgaaagatatttatagaatattaatggactcattacgcatcagagggaagaacgtttttgactatgaaaattggaatgatgctcttactaaaaaagcactgacctataaagatatccatacggtagtaaccaaaatagtctcaaaaggtaattccgatttaaattttgaagcaataaaatacatattagatgatctaaatttaaagggcacgattaaggcaaaaataatacaaaaaataaattcatattcactaaccctactctcaccgacccttgcaattatcaaagcccaaaaagaaatacaagagttacttaaaaagaactctaaaaaaattgaaattgaaatgtcttatgaattgctcgaaaggctaatcatagacttatcaaaagatactattggtttgtttgaggataatatttctatatcatctgcgatcatttacgaaatggtagaggcaacaaactaa

SEQ ID NO: 92637 - DNA, 1671 bp, Yersinia pestis PY-53; identical to SEQ ID NO: 92563

SEQ ID NO: 92638 - DNA, 1089 bp, Yersinia pestis PY-55; identical to SEQ ID NO: 92562

SEQ ID NO: 92639 - DNA, 1671 bp, Yersinia pestis PY-55; identical to SEQ ID NO: 92563

SEQ ID NO: 92640 - DNA, 1089 bp, Yersinia pestis PY-56; identical to SEQ ID NO: 92562

SEQ ID NO: 92641 - DNA, 1671 bp, Yersinia pestis PY-56; identical to SEQ ID NO: 92563

SEQ ID NO: 92642 - DNA, 1089 bp, Yersinia pestis PY-59; identical to SEQ ID NO: 92562

SEQ ID NO: 92643 - DNA, 1671 bp, Yersinia pestis PY-59; identical to SEQ ID NO: 92563

SEQ ID NO: 92644 - DNA, 1089 bp, Yersinia pestis PY-60; identical to SEQ ID NO: 92562

SEQ ID NO: 92645 - DNA, 1671 bp, Yersinia pestis PY-60; identical to SEQ ID NO: 92563

SEQ ID NO: 92646 - DNA, 1089 bp, Yersinia pestis PY-63; identical to SEQ ID NO: 92562

SEQ ID NO: 92647 - DNA, 1671 bp, Yersinia pestis PY-63; identical to SEQ ID NO: 92563

SEQ ID NO: 92648 - DNA, 1089 bp, Yersinia pestis PY-64; identical to SEQ ID NO: 92562

SEQ ID NO: 92649 - DNA, 1671 bp, Yersinia pestis PY-64; identical to SEQ ID NO: 92563

SEQ ID NO: 92650 - DNA, 1089 bp, Yersinia pestis PY-65; identical to SEQ ID NO: 92562

SEQ ID NO: 92651 - DNA, 1671 bp, Yersinia pestis PY-65; identical to SEQ ID NO: 92563

SEQ ID NO: 92652 - DNA, 1089 bp, Yersinia pestis PY-71; identical to SEQ ID NO: 92562

SEQ ID NO: 92653 - DNA, 1671 bp, Yersinia pestis PY-71; identical to SEQ ID NO: 92563

SEQ ID NO: 92654 - DNA, 1089 bp, Yersinia pestis PY-72; identical to SEQ ID NO: 92562

SEQ ID NO: 92655 - DNA, 1671 bp, Yersinia pestis PY-72; identical to SEQ ID NO: 92563

SEQ ID NO: 92656 - DNA, 1089 bp, Yersinia pestis PY-76; identical to SEQ ID NO: 92562

SEQ ID NO: 92657 - DNA, 1671 bp, Yersinia pestis PY-76; identical to SEQ ID NO: 92563

SEQ ID NO: 92658 - DNA, 1089 bp, Yersinia pestis PY-89; identical to SEQ ID NO: 92562

SEQ ID NO: 92659 - DNA, 1671 bp, Yersinia pestis PY-89; identical to SEQ ID NO: 92563

SEQ ID NO: 92660 - DNA, 1089 bp, Yersinia pestis PY-90; identical to SEQ ID NO: 92562

SEQ ID NO: 92661 - DNA, 1671 bp, Yersinia pestis PY-90; identical to SEQ ID NO: 92563

SEQ ID NO: 92662 - DNA, 1089 bp, Yersinia pestis PY-91; identical to SEQ ID NO: 92562

SEQ ID NO: 92663 - DNA, 1671 bp, Yersinia pestis PY-91; identical to SEQ ID NO: 92563

SEQ ID NO: 92664 - DNA, 1089 bp, Yersinia pestis PY-92; identical to SEQ ID NO: 92562

SEQ ID NO: 92665 - DNA, 1671 bp, Yersinia pestis PY-92; identical to SEQ ID NO: 92563

SEQ ID NO: 92666 - DNA, 1089 bp, Yersinia pestis PY-93; identical to SEQ ID NO: 92562

SEQ ID NO: 92667 - DNA, 1671 bp, Yersinia pestis PY-93; identical to SEQ ID NO: 92563

SEQ ID NO: 92668 - DNA, 1089 bp, Yersinia pestis PY-96; identical to SEQ ID NO: 92562

SEQ ID NO: 92669 - DNA, 1671 bp, Yersinia pestis PY-96; identical to SEQ ID NO: 92563

SEQ ID NO: 92670 - DNA, 1089 bp, Yersinia pestis PY-98; identical to SEQ ID NO: 92562

SEQ ID NO: 92671 - DNA, 1671 bp, Yersinia pestis PY-98; identical to SEQ ID NO: 92563

SEQ ID NO: 92672 - DNA, 1089 bp, Yersinia pestis PY-99; identical to SEQ ID NO: 92562

SEQ ID NO: 92673 - DNA, 1671 bp, Yersinia pestis PY-99; identical to SEQ ID NO: 92563

SEQ ID NO: 92674 - DNA, 1089 bp, Yersinia pestis PY-100; identical to SEQ ID NO: 92562

SEQ ID NO: 92675 - DNA, 1671 bp, Yersinia pestis PY-100; identical to SEQ ID NO: 92563

SEQ ID NO: 92676 - DNA, 1089 bp, Yersinia pestis PY-102; identical to SEQ ID NO: 92562

SEQ ID NO: 92677 - DNA, 1671 bp, Yersinia pestis PY-102; identical to SEQ ID NO: 92563

SEQ ID NO: 92678 - DNA, 1089 bp, Yersinia pestis PY-36; identical to SEQ ID NO: 92562

SEQ ID NO: 92679 - DNA, 1671 bp, Yersinia pestis PY-36; identical to SEQ ID NO: 92563

SEQ ID NO: 92680 - DNA, 1089 bp, Yersinia pestis PY-42; identical to SEQ ID NO: 92562

SEQ ID NO: 92681 - DNA, 1671 bp, Yersinia pestis PY-42; identical to SEQ ID NO: 92563

SEQ ID NO: 92682 - DNA, 1089 bp, Yersinia pestis PY-46; identical to SEQ ID NO: 92562

SEQ ID NO: 92683 - DNA, 1671 bp, Yersinia pestis PY-46; identical to SEQ ID NO: 92563

SEQ ID NO: 92684 - DNA, 1089 bp, Yersinia pestis PY-47; identical to SEQ ID NO: 92562

SEQ ID NO: 92685 - DNA, 1671 bp, Yersinia pestis PY-47; identical to SEQ ID NO: 92563

SEQ ID NO: 92686 - DNA, 1089 bp, Yersinia pestis PY-52; identical to SEQ ID NO: 92562

SEQ ID NO: 92687 - DNA, 1671 bp, Yersinia pestis PY-52; identical to SEQ ID NO: 92563

SEQ ID NO: 92688 - DNA, 1089 bp, Yersinia pestis PY-61; identical to SEQ ID NO: 92562

SEQ ID NO: 92689 - DNA, 1671 bp, Yersinia pestis PY-61; identical to SEQ ID NO: 92563

SEQ ID NO: 92690 - DNA, 1089 bp, Yersinia pestis PY-88; identical to SEQ ID NO: 92562

SEQ ID NO: 92691 - DNA, 1671 bp, Yersinia pestis PY-88; identical to SEQ ID NO: 92563

SEQ ID NO: 92692 - DNA, 1089 bp, Yersinia pestis PY-94; identical to SEQ ID NO: 92562

SEQ ID NO: 92693 - DNA, 1671 bp, Yersinia pestis PY-94; identical to SEQ ID NO: 92563

SEQ ID NO: 92694 - DNA, 1089 bp, Yersinia pestis PY-95; identical to SEQ ID NO: 92562

SEQ ID NO: 92695 - DNA, 1671 bp, Yersinia pestis PY-95; identical to SEQ ID NO: 92563

SEQ ID NO: 92696 - DNA, 1089 bp, Yersinia pestis PY-101; identical to SEQ ID NO: 92562

SEQ ID NO: 92697 - DNA, 1671 bp, Yersinia pestis PY-101; identical to SEQ ID NO: 92563

SEQ ID NO: 92698 - DNA, 1089 bp, Yersinia pestis INS; identical to SEQ ID NO: 92562

SEQ ID NO: 92699 - DNA, 1671 bp, Yersinia pestis INS; identical to SEQ ID NO: 92563

SEQ ID NO: 92700 - DNA, 1089 bp, Yersinia pestis 9; identical to SEQ ID NO: 92562

SEQ ID NO: 92701 - DNA, 537 bp, Yersinia pestis 9
atgaaaaaattaatactaaagaagatcatgatactctcagattcaggaaaatccgcgaggcaattcgagttcggagagcatctaacactgataacagcagatgatgataatagcgtagggaaatctacgcttgcaaaaatgattttttggacttttggctgtgagcccattttttccgaggtttggagaacattagactgtacatcaattatagagtttgagataaataatgcaccttacattattcatagatataaaaatgaaattaaaattaggcatagcaatggtaaactacacagtttcccaaaaataaccggtgattattcaaagtatttttcagaacttgttaattttaatgtattactccctaagaaaggtcaattaacactagaaaccctccacctgcatattacttcatacccttttatattgaccaaaaaagaacatgggctaaaccttgggatagtttcgagaatcttcagcaatatagtagctgggcaaaaccagtcatctcctaccactcaggattatttataa

SEQ ID NO: 92702 - DNA, 1089 bp, Yersinia pestis 113; identical to SEQ ID NO: 92562

SEQ ID NO: 92703 - DNA, 1671 bp, Yersinia pestis 113; identical to SEQ ID NO: 92563

SEQ ID NO: 92704 - DNA, 1089 bp, Yersinia pestis S3; identical to SEQ ID NO: 92562

SEQ ID NO: 92705 - DNA, 1671 bp, Yersinia pestis S3; identical to SEQ ID NO: 92563

SEQ ID NO: 92706 - DNA, 1089 bp, Yersinia pestis; identical to SEQ ID NO: 92562

SEQ ID NO: 92707 - DNA, 1671 bp, Yersinia pestis; identical to SEQ ID NO: 92563

SEQ ID NO: 92708 - DNA, 1089 bp, Yersinia pestis; identical to SEQ ID NO: 92562

SEQ ID NO: 92709 - DNA, 1671 bp, Yersinia pestis; identical to SEQ ID NO: 92563

SEQ ID NO: 92710 - DNA, 1089 bp, Yersinia pestis; identical to SEQ ID NO: 92562

SEQ ID NO: 92711 - DNA, 1671 bp, Yersinia pestis; identical to SEQ ID NO: 92563

SEQ ID NO: 92712 - DNA, 1089 bp, Yersinia pestis Pestoides F; identical to SEQ ID NO: 92562

SEQ ID NO: 92713 - DNA, 1146 bp, Yersinia pestis Pestoides F; identical to SEQ ID NO: 92571

SEQ ID NO: 92714 - DNA, 1089 bp, Yersinia pestis; identical to SEQ ID NO: 92562

SEQ ID NO: 92715 - DNA, 1671 bp, Yersinia pestis; identical to SEQ ID NO: 92563

SEQ ID NO: 92716 - DNA, 1089 bp, Yersinia pestis; identical to SEQ ID NO: 92562

SEQ ID NO: 92717 - DNA, 1671 bp, Yersinia pestis; identical to SEQ ID NO: 92563

SEQ ID NO: 92718 - DNA, 1089 bp, Yersinia pestis A1122; identical to SEQ ID NO: 92562

SEQ ID NO: 92719 - DNA, 1671 bp, Yersinia pestis A1122; identical to SEQ ID NO: 92563

SEQ ID NO: 92720 - DNA, 1089 bp, Yersinia pestis; identical to SEQ ID NO: 92562

SEQ ID NO: 92721 - DNA, 1671 bp, Yersinia pestis; identical to SEQ ID NO: 92563

SEQ ID NO: 92722 - DNA, 1089 bp, Yersinia pestis Antiqua; identical to SEQ ID NO: 92562

SEQ ID NO: 92723 - DNA, 1671 bp, Yersinia pestis Antiqua; identical to SEQ ID NO: 92563

SEQ ID NO: 92724 - DNA, 1089 bp, Yersinia pestis Angola; identical to SEQ ID NO: 92562

SEQ ID NO: 92725 - DNA, 1671 bp, Yersinia pestis Angola
atgaaaaaattaatactaaagaagatcatgatactctcagattcaggaaaatccgcgaggcaattcgagttcggagagcatctaacactgataacagcagatgatgataatagcgtagggaaatctacgcttgcaaaaatgattttttggacttttggctgtgagcccattttttccgaggtttggagaacattagactgtacatcaattatagagtttgagataaataatgcaccttacattattcatagatataaaaatgaaattaaaattaggcatagcaatggtaaactacacagtttcccaaaaataaccggtgattattcaaagtatttttcagaacttgttaattttaatgtattactccctaagaaaggtcaattaacactagaaacccctccacctgcatattacttcatacccttttatattgaccaaaaaagaacatgggctaaaccttgggatagtttcgagaatcttcagcaatatagtagctgggcaaaaccagtcatctcctaccactcaggattatttataaaagcacactttgaagttgaaaaagatatttatgtaataaaaagagagttagaagaagttgagaaaggcgttactgaactgaataatgcagttataatactcaggcaaaaccttatcgatacagacaatgtacttccttcgaccgagtttatttttagtgttatacaagaatcagaaaaaaacaaaaaaaaccttcttgaagaaagaactaacttaagagttgaaaaaatacgacttgagtcgcaaatcaaattagccaaagggattattagtgagctagataaagattatattttttccgtcgaaaacatggaagatggtgacatagagtgcccaacatgtggaacaatacatgaaaattctatagcacatcgcactagcattttgattgatatggaacttgcaaaaaaccaactcgaatccttagagtcagaagtcaacggaataataaatttgctagttataaaagatgaggagattacagagcaaagcaataagagcgaacgaagttataataatgtcattgaaagtgactccaattcgttaatatcattcaccaatgataagtttgaaaaacgcgcacacgaaataaatagtaaaaaaaatataaccattgaaattaaaaaatcagaagaaaaaacagcaaaaaaatctcaaagtgacatactatccaagaaacaaaaaagtgaaataaagcaaagcttcgcagatagattatcgaaatacataacaaaattaaaagttaacgttgacatatctaaaataaaaagccctcttgattataaaaaaatatataaagtaggcggtgcagcagaagatgcaagggctgtccttggttattatttagcaatttatgaacaagtagcggactcatgtgaagaagcattgccacctttggttattgataccccaaaccaacaagaacaagcaagcgggaattataccaacattataaaatcaatttctgacggcataaataatgataggcaatatgttatatgtgccatggaacacaaagccttagagcaaataaaaacaaatgctcaagtaattaaattagacgcaagaaaaatactattacaagatcaatacgagaaaatttcaaaactgcgaaatgaagttattttcgattga

SEQ ID NO: 92726 - DNA, 1089 bp, Yersinia pestis; identical to SEQ ID NO: 92562

SEQ ID NO: 92727 - DNA, 1671 bp, Yersinia pestis; identical to SEQ ID NO: 92563

SEQ ID NO: 92728 - DNA, 1089 bp, Yersinia pestis; identical to SEQ ID NO: 92562

SEQ ID NO: 92729 - DNA, 1671 bp, Yersinia pestis; identical to SEQ ID NO: 92563

SEQ ID NO: 92730 - DNA, 1089 bp, Yersinia pestis str. Pestoides B; identical to SEQ ID NO: 92562

SEQ ID NO: 92731 - DNA, 1671 bp, Yersinia pestis str. Pestoides B; identical to SEQ ID NO: 92563

SEQ ID NO: 92732 - DNA, 1089 bp, Yersinia pestis Pestoides G; identical to SEQ ID NO: 92562

SEQ ID NO: 92733 - DNA, 1146 bp, Yersinia pestis Pestoides G; identical to SEQ ID NO: 92571

SEQ ID NO: 92734 - DNA, 1089 bp, Yersinia pestis; identical to SEQ ID NO: 92562

SEQ ID NO: 92735 - DNA, 1671 bp, Yersinia pestis; identical to SEQ ID NO: 92563

SEQ ID NO: 92736 - DNA, 1089 bp, Yersinia pestis; identical to SEQ ID NO: 92560

SEQ ID NO: 92737 - DNA, 1491 bp, Yersinia pestis; identical to SEQ ID NO: 92561

SEQ ID NO: 92738 - DNA, 1089 bp, Yersinia pestis subsp. pestis bv. Orientalis; identical to SEQ ID NO: 92562

SEQ ID NO: 92739 - DNA, 1671 bp, Yersinia pestis subsp. pestis bv. Orientalis; identical to SEQ ID NO: 92563

SEQ ID NO: 92740 - DNA, 1089 bp, Yersinia pestis; identical to SEQ ID NO: 92562

SEQ ID NO: 92741 - DNA, 1671 bp, Yersinia pestis
atgaaaaaattaatactaaagaagatcatgatactctcagattcaggaaaatccgcgaggcaattcgagttcggagagcatctaacactgataacagcagatgatgataatagcgtagggaaatctacgcttgcaaaaatgattttttggacttttggctgtgagcccattttttccgaggtttggagaacattagactgtacatcaattatagagtttgagataaataatgcaccttacattattcatagatataaaaatgaaattaaaattaggcatagcaatggtaaactacacagtttcccaaaaataaccggtgattattcaaagtatttttcagaacttgttaattttaatgtattactccctaagaaaggtcaattaacactagaaacccctccacctgcatattacttcatacccttttatattgaccaaaaaagaacatgggctaaaccttgggatagtttcgagaatcttcagcaatatagtagctgggcaaaaccagtcatctcctaccactcaggattatttataaaagcacactttgaagttgaaaaagatatttatgtaataaaaagagagttagaagaagttgagaaaggcgttactgaactgaataatgcagttataatactcaggcaaaaccttatcgatacagacaatgtacttccttcgaccgagtttatttttagtgttatacaagaatcagaaaaaaacaaaaaaaaccttcttgaagaaagaactaacttaagagttgaaaaaatacgacttgagtcgcaaatcaaattagccaaagggattattagtgagctagataaagattatattttttccgtcgaaaacatggaagatggtgacatagagtgcccaacatgtggaacaatacatgaaaattctatagcacatcgcactagcattttgattgatatggaacttgcaaaaaaccaactcgaatccttagagtcagaagtcaacggaataataaatttgctagttataaaagatgaggagattacagagcaaagcaataagagcgaacgaagttataataatgtcattgaaagtgactccaattcgttaatatcattcaccaatgataagtttgaaaaacgcgcacacgaaataaatagtaaaaaaaatataaccattgaaattaaaaaatcagaagaaaaaacagcaaaaaaatctcaaagtgacatactatccaaggaacaaaaaagtgaaataaagcaaagcttcgcagatagattatcgaaatacataacaaaattaaaagttaacgttgacatatctaaaataaaaaaccctcttgattataaaaaaatatatgaagtaggcggtgcagcagaagatgcaagggctgtccttggttattatttagcaatttatgaacaagtagcggactcatgtgaagaagcattgccacctttggttattgataccccaaaccaacaagaacaagcaagcgggaattataccaacattataaaatcaatttctgacggcataaataatgataggcaatatgttatatgtgccatggaacacaaagccttagagcaaataaaaacaaatgctcaagtaattaaattagacgcaagaaaaatactattacaagatcaatacgagaaaatttcaaaactgcgaaatgaagttattttcgattga

SEQ ID NO: 92742 - DNA, 1089 bp, Yersinia pestis 14735; identical to SEQ ID NO: 92562

SEQ ID NO: 92743 - DNA, 1146 bp, Yersinia pestis 14735; identical to SEQ ID NO: 92571

SEQ ID NO: 92744 - DNA, 1089 bp, Yersinia pestis 1670; identical to SEQ ID NO: 92562

SEQ ID NO: 92745 - DNA, 1146 bp, Yersinia pestis 1670; identical to SEQ ID NO: 92571

SEQ ID NO: 92746 - DNA, 1089 bp, Yersinia pestis 790; identical to SEQ ID NO: 92562

SEQ ID NO: 92747 - DNA, 1671 bp, Yersinia pestis 790; identical to SEQ ID NO: 92563

SEQ ID NO: 92748 - DNA, 1089 bp, Yersinia pestis 1412; identical to SEQ ID NO: 92562

SEQ ID NO: 92749 - DNA, 1146 bp, Yersinia pestis 1412; identical to SEQ ID NO: 92571

SEQ ID NO: 92750 - DNA, 1089 bp, Yersinia pestis 1522; identical to SEQ ID NO: 92562

SEQ ID NO: 92751 - DNA, 1146 bp, Yersinia pestis 1522; identical to SEQ ID NO: 92571

SEQ ID NO: 92752 - DNA, 1089 bp, Yersinia pestis 1045; identical to SEQ ID NO: 92560

SEQ ID NO: 92753 - DNA, 1671 bp, Yersinia pestis 1045; identical to SEQ ID NO: 92563

SEQ ID NO: 92754 - DNA, 1089 bp, Yersinia pestis 8787; identical to SEQ ID NO: 92562

SEQ ID NO: 92755 - DNA, 1146 bp, Yersinia pestis 8787; identical to SEQ ID NO: 92571

SEQ ID NO: 92756 - DNA, 1089 bp, Yersinia pestis 3770; identical to SEQ ID NO: 92562

SEQ ID NO: 92757 - DNA, 1146 bp, Yersinia pestis 3770; identical to SEQ ID NO: 92571

SEQ ID NO: 92758 - DNA, 1089 bp, Yersinia pestis 3067; identical to SEQ ID NO: 92562

SEQ ID NO: 92759 - DNA, 1146 bp, Yersinia pestis 3067; identical to SEQ ID NO: 92571

SEQ ID NO: 92760 - DNA, 1089 bp, Yersinia pestis 2944; identical to SEQ ID NO: 92560

SEQ ID NO: 92761 - DNA, 1671 bp, Yersinia pestis 2944; identical to SEQ ID NO: 92563

SEQ ID NO: 92762 - DNA, 1089 bp, Yersinia pestis 1413; identical to SEQ ID NO: 92562

SEQ ID NO: 92763 - DNA, 1146 bp, Yersinia pestis 1413; identical to SEQ ID NO: 92571

SEQ ID NO: 92764 - DNA, 1089 bp, Yersinia pestis; identical to SEQ ID NO: 92560

SEQ ID NO: 92765 - DNA, 1491 bp, Yersinia pestis; identical to SEQ ID NO: 92561

SEQ ID NO: 92766 - DNA, 1089 bp, Yersinia pestis; identical to SEQ ID NO: 92562

SEQ ID NO: 92767 - DNA, 1671 bp, Yersinia pestis; identical to SEQ ID NO: 92563

SEQ ID NO: 92768 - DNA, 1089 bp, Yersinia pestis CO92; identical to SEQ ID NO: 92562

SEQ ID NO: 92769 - DNA, 1671 bp, Yersinia pestis CO92; identical to SEQ ID NO: 92563

SEQ ID NO: 92770 - DNA, 1089 bp, Yersinia pestis; identical to SEQ ID NO: 92562

SEQ ID NO: 92771 - DNA, 1671 bp, Yersinia pestis; identical to SEQ ID NO: 92563

SEQ ID NO: 92772 - DNA, 1173 bp, Yersinia pseudotuberculosis PB1/+; identical to SEQ ID NO: 92558

SEQ ID NO: 92773 - DNA, 1758 bp, Yersinia pseudotuberculosis PB1/+; identical to SEQ ID NO: 92559

SEQ ID NO: 92774 - DNA, 1179 bp, Yersinia pseudotuberculosis IP 32953
atgattatgaatgagttgcatgagattaagcctagagagcaagctggccgagatacgttagagagatataatgctcaagtaagagctgctagtattgcttgtttatcaattttagaaggaaaggatgttgtaagagtttactgtgaatttcatgatgattttgttattgaaaagaataagttaggtaaaattgcatattcttttgttcaagttaaaacgaaagataaattaagtgacatatggaagctaaatgatgtttttggcattctcactaggaatagtaaaaaaaaacctcagacagatgaaaaggttgttaatagctttatcggtaagctaatacagcatacagttaactttcctgaaacatgtgaaaatattatctttatgactaatacacatgttaacgaagatattgacgcggttgttactgatttattaaatgaagattttagtaataagcacacattatttttaattgaaaaattcaatggttttttttcacctgccttgagtttaactgatgagcaaattaaagttaatctcaagaaaattatcattaactctgatgttcaatatataaaaagccaaaataataattttgagtcattagcaaaagatgtgatttataagtatagcgagattgatcttcaatacgtggaagccaaagaaataattatttcacttcaatcattagttaactcaaaatcaagtgttaaaattaaatcagtcactaaggatagtcttttatctgctagtggtgttggaattgatgatttattaagtgtattaagtatatcaaaagtagcgtattacgaacttcttaaaggtggtgatgaaaaagcaattaaatcagcatctgttattgaacggatgttgcgaagagcaggtgcgaaggatgatgaagtagaatattgtgcaaagtgtaaaaccaaatgggatgggtggttgagaattaaccgacatattttacctgctattgatatcaccgttatagaaggatatataggcgatataatttcagagttgtcccgtggaaggaatatcgttagattaagccttcttagaactttgatgaataatcttatagataaattagaaaaagaaaagatagtttatgatttaaataatgacttaatttgcggtggcattttttcgcaactggttaggaatgaaaaatga

SEQ ID NO: 92775 - DNA, 1116 bp, Yersinia pseudotuberculosis IP 32953
atgaaacttgttagcttatttttaaaaggaagggctgtaagtggcttggagtcagaggttctcattttcgcaaaagaaataacagagctttttggccctaatggtagtggcaaaacaccgctgttacaatcagtagtttattgtctgggatatccttgtaaattccgcgatgatatttataacttttgtgaatatgctcagcttgaatttgaaatttctggtgagaaatatacatctagacgagattttaagcagaaagagttctatattagattggttggttccaatggtcaggttgaacattttcataatgaaataacttactcaaaatatattattggattattgaagcttccatatccatcattagttactattaaaaatgaacaaacacacccatacctgtcaacattacttcctatattctatgtagatcaagatgatggttactccagatattattctgcacataataattttataaaagatcagttttctgaaatgttaagagttatttttggtttgccagaaagaaactcgttcatttcaaaaaaagaactaattgatgctgaggcacaattagaataccttgataaggttttggtagttcagcgtagagaagttgaactagcaagaagtgaaataaatgtaaatagaaagctagaggatatagacttagccatctctaatttaaatagagagttaagcgatttaaaagatgatagcaataataaaaatgatgcattatctagcatgaatgtattaatatcatcgcacaaaaaaagaatcagaattttaaatgatgagcttgatgatattaatcgacggaaaattagtttagctaaaataaaagatgagataaatatagagataaatacgttaaatataaatgaggaagccaaacgggtattcaggtcattcaaagagatatgtccatcagatggatgtaagatgttttctcaaagctcagaaagttatggaaagaatcttctatatttgagagaccaaataaaagatatcgagagaaatattgagcttgatagtcattctgtcgataaaataaaaagtgagttagacacgactaaaaaaactaatagaagaaattctagaaattag

SEQ ID NO: 92776 - DNA, 1218 bp, Yersinia pseudotuberculosis NBRC 105692
ttggacactaagttactatttgtacactcagataagtggatgattatgaatgagttgcatgagattaagcctagagagcaagctggccgagatacgttagagagatataatgctcaagtaagagctgctagtattgcttgtttatcaattttagaaggaaaggatgttgtaagagtttactgtgaatttcatgatgattttgttattgaaaagaataagttaggtaaaattgcatattcttttgttcaagttaaaacgaaagataaattaagtgacatatggaagctaaatgatgtttttggcattctcactaggaatagtaaaaaaaaacctcagacagatgaaaaggttgttaatagctttatcggtaagctaatacagcatacagttaactttcctgaaacatgtgaaaatattatctttatgactaatacacatgttaacgaagatattgacgcggttgttactgatttattaaatgaagattttagtaataagcacacattatttttaattgaaaaattcaatggttttttttcacctgccttgagtttaactgatgagcaaattaaagttaatctcaagaaaattatcattaactctgatgttcaatatataaaaagccaaaataataattttgagtcattagcaaaagatgtgatttataagtatagcgagattgatcttcaatacgtggaagccaaagaaataattatttcacttcaatcattagttaactcaaaatcaagtgttaaaattaaatcagtcactaaggatagtcttttatctgctagtggtgttggaattgatgatttattaagtgtattaagtatatcaaaagtagcgtattacgaacttcttaaaggtggtgatgaaaaagcaattaaatcagcatctgttattgaacggatgttgcgaagagcaggtgcgaaggatgatgaagtagaatattgtgcaaagtgtaaaaccaaatgggatgggtggttgagaattaaccgacatattttacctgctattgatatcaccgttatagaaggatatataggcgatataatttcagagttgtcccgtggaaggaatatcgttagattaagccttcttagaactttgatgaataatcttatagataaattagaaaaagaaaagatagtttatgatttaaataatgacttaatttgcggtggcattttttcgcaactggttaggaatgaaaaatga

SEQ ID NO: 92777 - DNA, 1758 bp, Yersinia pseudotuberculosis NBRC 105692; identical to SEQ ID NO: 92559

SEQ ID NO: 92778 - DNA, 1173 bp, Yersinia pseudotuberculosis IP 32953; identical to SEQ ID NO: 92558

SEQ ID NO: 92779 - DNA, 1758 bp, Yersinia pseudotuberculosis IP 32953; identical to SEQ ID NO: 92559

SEQ ID NO: 92780 - DNA, 1173 bp, Yersinia pseudotuberculosis; identical to SEQ ID NO: 92558

SEQ ID NO: 92781 - DNA, 1758 bp, Yersinia pseudotuberculosis; identical to SEQ ID NO: 92559

SEQ ID NO: 92782 - DNA, 1173 bp, Yersinia pseudotuberculosis
atgaatgagttgcatgagattaagcctagagagcaagctggccgagatacgttagagaaatataatgctcaagtaagagctgctagtattgcttgtttatcaattttagaaggaaaggatgttgtaagagtttactgtgaatttcatgatgattttgttattgaaaagaataagttaggtaaaattgcatattcttttgttcaagttaaaacgaaagataaattaagtgacatatggaagctaaatgatgtttttggcattctcactaggaatagtaaaaaaaaacctcagacagatgaaaaggttgttaatagctttatcggtaagctaatacagcatacagttaactttcctgaaacatgtgaaaatattatctttatgactaatacacatgttaacgaagatattgacgcggttgttactgatttattaaatgaagattttagtaataagcacacattatttttaattgaaaaattcaatggttttttttcacctgccttgagtttaactgatgagcaaattaaagttaatctcaagaaaattatcattaactctgatgttcaatatataaaaagccaaaataataattttgagtcattagcaaaagatgtgatttataagtatagcgagattgatcttcaatacgtggaagccaaagaaataattatttcacttcaatcattagttaactcaaaatcaagtgttaaaattaaatcagtcactaaggatagtcttttatctgctagtggtgttggaattgatgatttattaagtgtattaagtatatcaaaagtagcgtattacgaacttcttaaaggtggtgatgaaaaagcaattaaatcagcatctgttattgaacggatgttgcgaagagcaggtgcgaaggatgatgaagtagaatattgtgcaaagtgtaaaaccaaatgggatgggtggttgagaattaaccgacatattttacctgctattgatatcaccgttatagaaggatatataggcgatataatttcagagttgtcccgtggaaggaatatcgttagattaagccttcttagaactttgatgaataatcttatagataaattagaaaaagaaaagatagtttatgatttaaataatgacttaatttgcggtggcattttttcgcaactggttaggaatgaaaaatga

SEQ ID NO: 92783 - DNA, 1758 bp, Yersinia pseudotuberculosis; identical to SEQ ID NO: 92559

SEQ ID NO: 92784 - DNA, 1173 bp, Yersinia pseudotuberculosis PB1/+; identical to SEQ ID NO: 92558

SEQ ID NO: 92785 - DNA, 1758 bp, Yersinia pseudotuberculosis PB1/+; identical to SEQ ID NO: 92559

SEQ ID NO: 92786 - DNA, 1173 bp, Yersinia pseudotuberculosis; identical to SEQ ID NO: 92558

SEQ ID NO: 92787 - DNA, 1758 bp, Yersinia pseudotuberculosis; identical to SEQ ID NO: 92559

SEQ ID NO: 92788 - DNA, 1089 bp, Yersinia pseudotuberculosis
atggatagtgaagacacatctgacaatcccttgtccgaaccgcaaagagagtccgcaggggcccagtcctatgatcgatttgaataccaatatcattgggctctttgtaaagcattcagttcatacaaagaaagcaatgactttgcaatcttcatggaatatcatgaagatgttgtctatgcgaattctatagataaaaataaagttaaatttactttcaatcaaattaaagccaatgcaaagaaaacttatactgcaaaagtattaaccaagcgagagaatggtacaaaaccatctcttttagggaagctttgtagttcagttagcgacaaaaaatactttgaaaaggttgaaaaattagattttataactacaagtggattcaacctcactaaaaacaacaagttaaacttggcttcatataaactgtctagcttaagtagtgatgaggctagtgaaattataaaatgcctaagtgatgagctcgctaacttcggaaagtttccgcaagaaataatacacttcactacctctgacattcctctagaaagctattatgagcatacaatatcaaggatcactgatagcgtcgaagaagtgaatccacaacatctacttcgtacgaaagatatttatagaatattaatggactcattacgcatcagagggaagaacgtttttgactatgaaaattggaatgatgctcttactaaaaaagcactgacctataaagatatccatacggtagtaaccaaaagagtctcaaaaggtaattccgatttaaattttgaagcaataaaatacatattagatgatctaaatttaaagggcacgattaaggcaaaaataatacaaaaaataaattcatattcactaaccctactctcaccgacccttgcaattatcaaagcccaaaaagaaatacaagagttacttaaaaagaactctaaaaaaattgaaattgaaatgtcttatgaattgctcgaaaggctaatcatagacttatcaaaagatactattggtttgtttgaggataatatttctatatcatctgcgatcatttacgaaatggtagaggcaacaaactaa

SEQ ID NO: 92789 - DNA, 1671 bp, Yersinia pseudotuberculosis
atgaaaaaattaatactaaagaagatcatgatactctcagattcaggaaaatccgcgaggcaattcgagttcggagagcatctaacactgataacagcagatgatgataatagcgtagggaaatctacgcttgcaaaaatgattttttggacttttggctgtgagcccattttttccgaggtttggagaacattagactgtacatcaattatagagtttgagataaataatgcaccttacattattcatagatataaaaatgaaattaaaattaggcatagcaatggtaaactacacagtttcccaaaaataaccggtgattattcaaagtatttttcagaacttgttaattttaatgtattactccctaagaaaggtcaattaacactagaaacccctccacctgcatattacttcatacccttttatattgaccaaaaaagaacatgggctaaaccttgggatagtttcgagaatcttcagcaatatagtagctgggcaaaaccagtcatctcctaccactcaggattatttataaaagcacactttgaagttgaaaaagatatttatgtaataaaaagagagttagaagaagttgagaaaggcgttactgaactgaataatgcagctataatactcaggcaaaaccttatcgatacagacaatgtacttccttcgaccgagtttatttttagtgttatacaagaatcagaaaaaaacaaaaaaaaccttcttgaagaaagaactaacttaagagttgaaaaaatacgacttgagtcgcaaatcaaattagccaaagggattattagtgagctagataaagattatattttttccgtcgaaaacatggaagatggtgacatagagtgcccaacatgtggaacaatacatgaaaattctatagcacatcgcactagcattttgattgatatggaacttgcaaaaaaccaactcgaatccttagagtcagaagtcaacggaataataaatttgctagttataaaagatgaggagattacagagcaaagcaataagagcgaacgaagttataataatgtcattgaaagtgactccaattcgttaatatcattcaccaatgataagtttgaaaaacgcgtacacgaaataaatagtaaaaaaaatataaccattgaaattaaaaaatcagaagaaaaaacagcaaaaaaatctcaaagtgacatactatccaaggaacaaaaaagtgaaataaagcaaagcttcgcagatagattatcgaaatacataacaaaattaaaagttaacgttgacatatctaaaataaaaagccctcttgattataaaaaaatatatgaagtaggcggtgcagcagaagatgcaagggctgtccttggttattatttagcaatttatgaacaagtagcggactcatgtgaagaagcattgccacctttggttattgataccccaaaccaacaagaacaagcaagcgggaattataccaacattataaaatcaatttctgacggcataaataatgataggcaatatgttatatgtaccatggaacacaaagccttagagcaaataaaaacaaatgctcaagtaattaaattagacgcaagaaaaatactattacaagatcaatacgagaaaatttcaaaactgcgaaatgaagttattttcgattga

SEQ ID NO: 92790 - DNA, 1089 bp, Yersinia pseudotuberculosis
atgtcagaaagcgtcaactcaggagttgaaggtggctcaggttatacgtttcaaagatgttgtgttgtatacctcctttttgatgagtatcaaaaactaaactcaccctcaatagactatttcatatgtgttgagcatcatgaggactttctttttacttatattgatgaaaatggcattattaatagtattgatacttttcaagcaaaaaaatcacgagatgattggaaaacggatcaagcgttttgcgaaattataggaaaaatatctcttgtaggaaatgaacttatcaatgacaggcatcccaagtcagaaaattataaacataccctatctttcctgacaaatagaaacattgttcttcagggtaaaaagaacaaagataaaaagcagataactgaaaaaatccagatatcaaatatctctaaaaactatccagaactgcatagtgaaattaaagagaatattcaatcaaaactaatcgatggaaaaatcgcagatttcaatcaattatcgaatgtgaaatttagttttattgatctcccgcagaaccataaaggatggaagagagttttaactggtttgtcaacagaagttttgggatgtaaagttaacgatcatgaagcagtaataacaacattaatggctctactacaagatgtagaattaacatataataacgccggatatgttttgcttgcagataaatcaaaacgtcttactaaacaaaaaatagactctacatttgatattttcacagaaagcaaaaaagcctttagcttctggcgaactcatgcagatgatttagcaaaaggattagaaataaaactccctataaaaagaagagcacaggagttattagacaactgttttgatttatttaaagatatacaacaagtagaatacaaaaaaatctataagtttgtatctgaaaacacctatatcgatgaaaagcatataaatgaggccgagtgtattacagagctatatcagatgtatattagctcatataactcaaggttagaaaaacatatgattgcttttgcaattatagctgcatatgtagaaacaagaggaatgtatgtctaa

SEQ ID NO: 92791 - DNA, 1758 bp, Yersinia pseudotuberculosis
atgtctaagttaatcctgaaaaatatactagcgtattctataaatggcaacggaatttttagcactgaatttggggagtcagttaatataatacatggtagaaacacctcaggtaaaagcacattaatgcaatcaatcctttattcaatgggagttaatgattcaaaggaaaacctgaatgatataatcagtgagaatgtcatttttcgccttgaatgtgaaatgcaaaatataaatacattcgaaaaaattgtttttgttcgcttagacgatacccttgttgttcgcattgcagataatccccccatacggtttgatggcatcaatggaaataattcatttgaatacggaaggtataaagaattatttaataagttatttaatttcaaactaatattacaaaaacaggctgatttcaccaatgcaccaattgaggcagcatttttaccattctacatatctcaatcagttggatgggtttatctaagagaatcgataggcgattaccggttttataaagattttaaatttgactatctcgactattacactggactaaaaaatcgtacagatagattgaagaaatacactctgaaaaaagaaaaacagcaacttgaatatgagcggagtcaattgattaaatataaatcaaaagataactctctgaaactatcagaaacattagaaactcgatttaaaggaaaggctcttgattacttaaagagttatgatcaattagcaacaacattaatttcagaagaagctaatcatgataaattatgtaataaattaagtatgcttcgtgggcgtgaaaaagtacttttacaaactatccgaaatttaaagctacaaaaaccaagagtagacagatgccctgtatgcgaacaaacattacccggcgacatcagagagttatatatatatactcaagatatcaatgatgctttaagagagaaggagataatctctgataaaatcaagacaatatcagcatcattaaactctgttgaaaaaaaaataaaagatagtagtgggataataaacaatgaatatagggtattgaaagaatctagagttgaaagtataggatttgagagttggataaatcatcatgctaacatcactattttaggtgaaattaaaaataaagaaagagattatgatgaaaagatatcaggcttgcaaacaaatatagataacctagcaaatgacgcagaaattgacacccttcgttatggaatagaaaaggaattccttgggatattccaagagaaagccaaatgtctagaagtaaagataccagatagttcgagatataaaaacctgtactcaattacatctttcccttatcaaggtgtagaattacataaaataattatggcctaccatttttcattttatcaattaataagtaaaagaaccacaattcataaatttccttttttattagatgctgtatttaaagaggatattgatgttggaaatagagaaataatatttaattttctttcaagcgaagcaaaaaatcacgaacaaatattattttctgtagctgaatataaaaaagaaaagaatccaacagaaggggatcctcttttcaacattaatgaaataaataatcgctatttctctggaagtgcaaagcaaatttgtataggaaacgcaaaaactgtaagatcgttcttgcttcagaaaagtttaaacgaagacgaacaatttttattagacgatgcattttctctgctacaaaccatataa

SEQ ID NO: 92792 - DNA, 1173 bp, Yersinia pseudotuberculosis; identical to SEQ ID NO: 92558

SEQ ID NO: 92793 - DNA, 1758 bp, Yersinia pseudotuberculosis
atgaaacttgttagcttatttttaaaaggaagggctgtaagtggcttggagtcagaggttctcattttcgcaaaagaaataacagagctttttggccctaatggtagtggcaaaacaccgctgttacaatcagtagtttattgtctgggatatccttgtaaattccgcgatgatatttataacttttgtgaatatgctcagcttgaatttgaaatttctggtgagaaatatacatctagacgagattttaagcagaaagagttctatattagattggttggttccaatggtcaggttgaacattttcataatgaaataacttactcaaaatatattattggattattgaaccttccatatccatcattagttactattaaaaatgaacaaacacacccatacctgtcaacattacttcctatattctatgtagatcaagatgatggttactccagatattattctgcacataataattttataaaagatcagttttctgaaatgttaagagttatttttggtttgccagaaagaaactcgttcatttcaaaaaaagaactaattgatgctgaggcacaattagaataccttgataaggttttggtagttcagcgtagagaagttgaactagcaagaagtgaaataaatgtaaatagaaagctagaggatatagacttagccatctctaatttaaatagagagttaagcgatttaaaagatgatagcaataataaaaatgatgcattatctagcatgaatgtattaatatcatcgcacaaaaaaagaatcagaattttaaatgatgagcttgatgatattaatcgacggaaaattagtttagctaaaataaaagatgagataaatatagagataaatacgttaaatataaatgaggaagccaaacgggtattcaggtcattcaaagagatatgtccatcagatggatgtaagatgttttctcaaagctcagaaagttatggaaagaatcttctatatttgagagaccaaataaaagatatcgagagaaatattgagcttgatagtcattctgtcgataaaataaaaagtgagttagacacgactaaaaaactaatagaagaaattctagaaattagagatcagatagcaaaaagtgaagggatatcatcaattgttgaaacaatatccattataactgctaatatctttactctacagctagaaaaaagtgagttacagaaagttggaatgcttgaagaaaaatattttgaaaatttaaataaaagagagttggctcaagatagagttgaaactttaaagaaaggtaagggtattatacctagagtaacaaagctaaaaatagaccttaaactagcttatattaaatggctagagatattaaatactctgaatatagataaaaatataacgtttaaagatgatttttatcctaatctaggtagtgaagtactaacgcaacttaaaggaagtactcgagttagagctattcttgcttataaggctgcattagtggaacttatgtgtgtaggtgataaaatgccatttaaatttataatattcgacacaccaaaacagcatgaaacacattacgaagatattgataaattcatgaatgaactgaaagttttatcaatgaaatatggttttcaagttgtgttctcctcgactgaatataagtatgtaggagattcaaatgatatgatttgggaacccaaattccctggtgaagagcatgagatgttcttagaacgtaactaa

SEQ ID NO: 92794 - DNA, 1089 bp, Yersinia pseudotuberculosis; identical to SEQ ID NO: 92788

SEQ ID NO: 92795 - DNA, 1671 bp, Yersinia pseudotuberculosis; identical to SEQ ID NO: 92789

SEQ ID NO: 92796 - DNA, 1089 bp, Yersinia pseudotuberculosis; identical to SEQ ID NO: 92790

SEQ ID NO: 92797 - DNA, 1758 bp, Yersinia pseudotuberculosis; identical to SEQ ID NO: 92791

SEQ ID NO: 92798 - DNA, 1089 bp, Yersinia pseudotuberculosis; identical to SEQ ID NO: 92788

SEQ ID NO: 92799 - DNA, 1671 bp, Yersinia pseudotuberculosis; identical to SEQ ID NO: 92789

SEQ ID NO: 92800 - DNA, 1089 bp, Yersinia pseudotuberculosis; identical to SEQ ID NO: 92788

SEQ ID NO: 92801 - DNA, 1671 bp, Yersinia pseudotuberculosis; identical to SEQ ID NO: 92789

SEQ ID NO: 92802 - DNA, 1173 bp, Yersinia pseudotuberculosis; identical to SEQ ID NO: 92558

SEQ ID NO: 92803 - DNA, 1758 bp, Yersinia pseudotuberculosis; identical to SEQ ID NO: 92559

SEQ ID NO: 92804 - DNA, 1032 bp, Edwardsiella tarda ATCC 23685
cgtgggggagagatagcgatacgaggatttgagtatcaaaggtgttgggcaatagacgaactgttaaatcgtcataaaaaaaatgaatcatatgtttttataccagagtatcatgatgatatattaatacttaattccccagtatcgccgaccattgcaacattcgcgcaagtcaaaacaagggatacacattggacaataactccgttaattaaatctgatggcgaaggtaaattatcttttataagtaaactgtttaagcataaatacgatttttcttcttatcaaactgatttgacatttattacaaatgcgctttttaaattttttgataagtatgagtttaacgctgatgaattgaaagaaaaagagaaaggtaaagttttaaatgctgtgcaggctcagttgccaggctttagctcatcagatttatcttctctgaaatttaaaacatccaatctcagtcttttggactatgacgcgcatcttctgggcaaaacagttgagtatttagaagatacaaacgcttcagaagttatcaatgcaatggcatttaaaagaactcttgttgagctttttgaaaagaaaactagagtttcatctaaagaaataaaaacatttaatgaattgatagagaaaaaaggtattagcaatgaactcatatctgaattaactttaaaaataaaagccctcaagactaattttcctgattgggagaatatgagtcttttattatccgtgttgcacaaagatgactttgaaaaactgactctgaaaattaaatatgagttatttttagttaatgtaaaaaatgcaagctcaattgaacatgatttttatcgaactctaaaacaatataattacaaggggaagcttaatgctactaatatccccgattttattctaggctcgatctcttacgcatcaaagcaactagatgaatttggacaattgattgatgatgattataaatatataatggcatgttgtgcagttattgaaatgatgtcagataatgaggcgaaaaaatga

SEQ ID NO: 92805 - DNA, 1665 bp, Edwardsiella tarda ATCC 23685
atgaaccaagtaatatttaagagagtcgccatattgtcgctttctgagaaaaaagcattcacttttaatttctcagaaggtttgaacttcattcatggcacaaatgacacaggaaaatcaagtctaattaaaagcttatacttttgtcttggcggcgatttgaggctggacgatagttggaagaagcaagagataattactaagctaacattatcttatcaagacaatattatagacttcattagaaaatcatcttattttgttgtgactgtatataaagatggagtgaagaagtcagaaaaactttttagtaaagtatctgaattaactggcgagattcagagtttatttgggtttaaccttctactaacccttaaaaaaaataaggaaacaatccttgcgaacccagcatccttctttttcccattttatatcgatcaggatgatggttggagcaatgttctagagtcatttaatggcctgaaaatgtatgtggattggcagaaaaacgcacttcaatatcattcaggcatcaagccaaaagaatattatgctctaaacggtgaacaaaaaatattagcgctgaatattaatgagcttgaacaagaagctgagcttataaggaaaacaaaattcaggtttgaaaagtatttcgaaaacatcagatttgatattgatgttgatttttatattgataagatcgattactttattaagcaatgcgaagacttagagttacaagaaagaatctatagattacaggctttgaatttatactctaaaaggaacatagtatctgatctcattttcaatattgaaaatgaaagagtgagtgtttccagcgaagagaatggcgaagatgacatatcgttttcattaaataaatatgaaattaacaaaaataaggttagcttgttcagccaaaaagcaagtttatacgatgaaaagaataagttagatgagcaactctcgattataagaattaagttattagagcatagagagaagagtgagtatataaagtctatgcttagcaatgtacatgaaaaattctcaattaaagagattattgactctgaagcttataagagtgctaccttagcatttgaacatcaattgtccgagatccaagaaagaataaatgcattagctttagaaaaggtcactattgatgctaaaattaaagcatttaataatataaagcgaactaaaactattaatgattattttcttttgatgcttaataaagcacaaactaagcttcatttaccgatctctgataaaggtggtgttataaagtataaggcattaacaactggtaaaactggtagtagcagtcctagagcaatttttgcttatcattatgcattgttaatgacaattaaagaattttcgacactaccaatattgccaatagttatcgattcgccaaagcaacaagatttggatgatgagttgactgaacaactaattcaattttgtctggatgatttagcagagatatcgcaggttataattggcgcagtcaaaccagaaaaaaatatggtcggatatcattctattaatttatttgaaaagtttagtctattacagccagatacctttgatggagtatttcaagaaattgtgccgcaattaaatgaaatgctagcacacttagattaa

SEQ ID NO: 92806 - DNA, 1074 bp, Edwardsiella tarda ATCC 15947 = NBRC 105688
gtgaaccttgctaatgcattaatacaggttccccaagatgaacgtgggggagagatagcgatacgaggatttgagtatcaaaggtgttgggcaatagacgaactgttaaatcgtcataaaaaaaatgaatcatatgtttttataccagagtatcatgatgatatattaatacttaattccccagtatcgccgaccattgcaacattcgcgcaagtcaaaacaagggatacacattggacaataactccgttaattaaatctgatggcgaaggtaaattatcttttataagtaaactgtttaagcataaatacgatttttcttcttatcaaactgatttgacatttattacaaatgcgctttttaaattttttgataagtatgagtttaacgctgatgaattgaaagaaaaagagaaaggtaaagttttaaatgctgtgcaggctcagttgccaggctttagctcatcagatttatcttctctgaaatttaaaacatccaatctcagtcttttggactatgacgcgcatcttctgggcaaaacagttgagtatttagaagatacaaacgcttcagaagttatcaatgcaatggcatttaaaagaactcttgttgagctttttgaaaagaaaactagagtttcatctaaagaaataaaaacatttaatgaattgatagagaaaaaaggtattagcaatgaactcatatctgaattaactttaaaaataaaagccctcaagactaattttcctgattgggagaatatgagtcttttattatccgtgttgcacaaagatgactttgaaaaactgactctgaaaattaaatatgagttatttttagttaatgtaaaaaatgcaagctcaattgaacatgatttttatcgaactctaaaacaatataattacaaggggaagcttaatgctactaatatccccgattttattctaggctcgatctcttacgcatcaaagcaactagatgaatttggacaattgattgatgatgattataaatatataatggcatgttgtgcagttattgaaatgatgtcagataatgaggcgaaaaaatga

SEQ ID NO: 92807 - DNA, 1665 bp, Edwardsiella tarda ATCC 15947 = NBRC 105688; identical to SEQ ID NO: 92805

SEQ ID NO: 92808 - DNA, 1089 bp, Aeromonas veronii
atgggtttagctgaagccttagttcatatcccacaatctgaaagaggtggagaaattgctcagcgtggttttgattatcaatcctgctgggctttgtctgagatgctggagtatgaactaaacgggaaaagttacgtttttattttcgagtatcatgatgacattcttattcttgataatacaatctctcccaaagacctaacttttgcacaagtaaaaacaaatgaaagtcattggactgcatcctcactgagcaagagtacaagtaaaaaaccaatatcaataattgggaaattatttattcattataaagacttcattgagtattcgcctcaacttttgtttgtcactaatgctgctttaaaattatgtgactgtaacggaggaaaatctttcttcggggctcacgaagtcaaaaaggaacaccaagataaattcaaacaagcaataaaagaccaagctaagctagatgactcatgcatcgatctttcagtaatgagatttatccaatcatcattaagcctagaggatcacattactcaccttaaaggaaaactatgtaatttcataagcaaaaaatatggtgatagttctacattaaatgttaatgtactagcatcattgcttgatcaagaatgcagaagtaaatctaaaatcaaatccgcagatataataaacttctcagatctaatagcaaagaaaggcttctcctcccaagacttaaataacgttttagattcgttgaatactagtaataaaaatttacctacttgggaaatggcgaagccagtatttcatgacctaggtaagaatgctctacagattattaaattacaagcaacttttctacaagtctgtatagagataaatcaagaaattaaaaacccttcgcgtatttatcaaaaagttgcaattgaactttatgatgaacaaaaaattcatttaaacctaaacgagtatgttattgcaacaatagataagattgatgcatgttgccctgactacgatctggcattaacggcatgcaaaaaagagtgcatcattatttattcaataattcaaatgttactgaaaggggatgataaatga

SEQ ID NO: 92809 - DNA, 1653 bp, Aeromonas veronii
atgagacatatatactttaaaagcgctcatatattgtctctcagagataaaagaggattcacttttgagttttcgccagatataaacattatcactggagcgaatgatactggaaaatccagttttataaaaagcttatattatacattgggagctgatattcgcttagataaaaaatggaagcaggatagctttgtttcaaaagttgtcatttgcgtcaataagcgagactatgcatttgttcgtcatgaaaagcgtatttcgatctttgatattactgatggaaatgaacgtctcttggttacatctaactctcgtacagagatcgcattgaccgtacgagatatttttgactttaatttagaactggtcttaaataagaccttggttcaaaggcaggcatatcctgcaagcctttaccttccattttacattgaccaagatgacggatggggtacggtattaaattcatttagcagcttgaagatgtacaaagattggcagaaaaacattttaaattttcatgctggtgttaagccaaaagaatattataaacttcaaggtgaaattagcttaattgatatcaaccttaaagaaataagagcaacattgaaggcactagaaacggctaaaaagcgttttgaagcatcattcggaagagtgctatttgatatagatattgattattatgaagaattattggaacgatttcttagtaagtgccagcaattacaccaagaagaaacagaatatagaattaaacttataaaattattatctcaacgcgatgagttagtatcagagatagattcatcccaaaaacagcttgatgagtgcgatatagatgatttatctccatctgcaagtttagaagcgaagtatgcggtacttaaaaacagagatattctatttcaagtcatacctaaactgtatgatcaaaaatcattatatgatgatcagattaataaaataaaagaagatttgaaaaactctcaacgattaagttctgatcttaaagatatgcttcaagaagtcaaagaacagttgacacttcaagatgttataaagtcgcaagcaagtaaacaggttgaatcaactttcgatgaacagatcgatgagctgctacgaaaaattggaaagttagacctatctagaactacgctgtcagaagaactcgctgcgtataataatataaagcgaacccgtgaaataaatgataaattcaaggagtcgttaattttcgcccaaacagagttaggtatcaaagacccaactgttgggacaattcttcaatttagcccaatatcaaaaagcgaaacgggtagccgagcaccaagggcaatactagcttaccattatgctcttcttaaaacgattgaagataagtcaactaacccaatgcttccagttgtaattgattccccgaaacaacaggatccggatccacatacaactgaaaaattattcaatttatgcattggtggtctatcaactaacaaccagctaattataggctcagtttcatttgagagaaaaactgacgagtttaaaacactgataatgaccaaaaaatatagcttattaaaagaagagttgtacgatgaggcttataaagaggtcatgcctttataccaaaaagcatcattatcataa

SEQ ID NO: 92810 - DNA, 1089 bp, Aeromonas veronii; identical to SEQ ID NO: 92808

SEQ ID NO: 92811 - DNA, 1653 bp, Aeromonas veronii; identical to SEQ ID NO: 92809

SEQ ID NO: 92812 - DNA, 1089 bp, Aeromonas veronii; identical to SEQ ID NO: 92808

SEQ ID NO: 92813 - DNA, 1653 bp, Aeromonas veronii; identical to SEQ ID NO: 92809

SEQ ID NO: 92814 - DNA, 1089 bp, Aeromonas veronii; identical to SEQ ID NO: 92808

SEQ ID NO: 92815 - DNA, 1653 bp, Aeromonas veronii; identical to SEQ ID NO: 92809

SEQ ID NO: 92816 - DNA, 1089 bp, Vibrio cholerae AM-19226
atgggtttagctgaagcgttgatcagtattccacagtctgaaagaggcggtgaaattgcacaacgaggttttgattaccaaacttgttgggcattgtcacagatgttggagtacgaactggatggaaaggactatgtgtttatctttgaatatcacgatgacgtactcattttagatagtgaagatgaccctcaagatttgacctttgcccaagttaagaccagagagtcaaattggactgtgcataatttactaaagagcaccgagaaaaagccaatatcaatcattggtaagcttttcttacatcagaaaaatttctcaggctattcacccaagttactgttcgtaaccaatgcttcgttcaacttccatactaaagctgggggaaagacctgttttgatgtaaatagcattgaaagtacagaccaagagaagtttaaacaagcaatcaaagaacaagtcgagttggagcaagaacatattgatttgtccactttaaggtttgttcagtcttccctcagcctagatgaccatatgacacacctaaaaggaaaactatgtgatttccttggaaaaaaatatggtgaaagcactacattgagtcctaacgtattggcgactttacttgagtctgagtgtaggcaaaaatctaaattcaaatcggcagatattgctaactttatggatttagtcacccgaaagggcttttcttcaaaagcattcaataatgttatcgaatctcttaatgccagtaacagcctgaagcctgactgggagatggcagagcctgtttttaaagatttaaacaaaggtgcactacaacttatacatctgaaggcatcgttctcacaaatctgtatcgacttgaataagaacaaaaaaactccatcaagtgtatatttagagcatgcaatcagtctttatgaccaaatcaaaatagataaagaccttaaattttatatcactgaaacaattgtcaatattgatgcgctttgtccggattatacaatgacactaaatttaggaaagaaagagtgtatcgttgtctattcaataatccagaagctgttagaggaaggtcataaatga

SEQ ID NO: 92817 - DNA, 1650 bp, Vibrio cholerae AM-19226
atgaaaaggatctattttaaaagcgctcacatattatctcttcgcgataagaaagggttcttttttgagttctcaccaaatgtgaatattatatccggtgaaaatgatacaggtaaatctagcttcatcaagagcttatatcatacactgggagctgatattcgtcttgataaaaaatggaaaaacgacaactttatatcaaaagtaatcatccacgttaaaaatcgagattatgcctttattcgtcataataagcgtatttctatctttgacctcacagaaggacaaaggcatttagttacatctaactcgcgttcagatatagctgagattgtacgtgatatttttgacttcaacttagaattggtcgtaaagaaaaccgctatacaagcacaagctctaccagctagcctctacttgcctttctatattgatcaagacaacggttggggtaaagtcttagactcatttagcaacctagctatgtataccgattggcaaaagaatattcttcacttccatgcaggaattaagccgaaagaatattacaagttacaaggtgagatgaatttaatagaccttgaccttggtgaaatattcgcaacgctaaaagctctagaagcagcgaaaaaacgattcgaagcttcattcggcagagtattgtttgatgtggatgttgagtactatgaagagttactaggacgttttctgagtaaatgtcaggaacttcatcaggaagaaactgcatacagaataaagctaatagaactactttctcatcgggacgagattgtatctgagattgaagaatgcaagcgacaacttgacgataatgatattgactcactttctacatcggcaggactagatgccaaatatactgttcttgcaaatagagaaaagttactggaaatcatacctgaattgtatgaacagaaatcagtttatgatgaaaagatagtcaatatcaaagaagaacttagaagtgctcagaaactaagctccaaacttaagacaatgctgcaagaagttaaagaaaacttaacgttgcaagacataattaaatctcaggctagtaaacaagttgagtttacattcgatgagcagataaaagaactacatgaaaaaataggtcaacttaatgcgactaagaacactcttgctaagaagatatctgaattcactgataaaaagcgcactcaagaaattaatgataaattcaaagagtctttgaaatatgctcaaacagaattaggaatacaagaacctgtattggggacaattcttcagtacggaaatattacaaaaagtgaaacaggaagccgtggacctagagcaattcttgcgtatcactatgctcttctaaaaacgattgaagagaaatcaacgatacctatgcttccagttgtaattgattcaccaaagcagcaagacccagacaagaacacaactaaaaagctatttgatttgtgcattgatggtttatcaaataaaaatcagttgattatcggctcagtctcctttgagcgagacactgatgaattccaaacattgacaatgaccgacaagtacagtttgttgaagccaaacttgtacgatgaagtttatgaacagataatgccgctatataagcaggtcgcatttccatga

SEQ ID NO: 92818 - DNA, 1116 bp, Vibrio cholerae BJG-01
atgagtacccaagatattgatgaaaattcaggtgtagaggcattactaggattcgagtttcagcgaaactgcgctttgctgttgttgttggacgattatagttcatacaccagcaaaaactattttatatctattgagcattatgatgattttttatttggttttagggattcaaacaaccaaaagctagagctcataaaaagttatcaggccaaaaagcgtacggaccaaaagtggaatataactgcactcgctgaaccgacaagtaaaatgcttgacgttgggaaagcgataaaaagcgacattgtagctaaagcctcaaactttcaatcagacctaatttttatatcagacagattaattgaactaaaatctgaaaatttaaataaaggaaaaaataagaaagccgaatatgttcttgaaaagataagacatgataacccttatatgtcatacacagaattgccggatatccttcgtaatcatgttcaagaaagtgtaagaaatgcctcaaagaatcagtacggtgactcggaatttgatcgccttgcttatcaatgggtagatttacctaaaacttctcgaaatcagctagccattcttgagacaagagtaagggagaattttaaaggcgttcctgatgctaaagctgctttatcagtacttttgaatctatttaagagtatagaaactgtttacaataaacgtagtaaaatatcattgatggattcaaggaaaatattagaaggcgaagacattaaaaaggccgttgaggtaattacatctcaacagaaggcattggatttttggcgggcatgtgcaagtgaactttgtccaagaattaaactaaatatgggtaaagccaataaagctaaggaatatattgggattgcatttgagttatttaaggataaaagcaaccaagagcacaagaaaatatataattttgttaaaaataaccattatgaggattgttgctttgatcatgctagtacaatagaaatgtttattgatgagtattataagtcaaatctatattctaatgctattgaacgagaagatgttatctttgcaattatttgtgcctatgttcagactagagatattactgtatga

SEQ ID NO: 92819 - DNA, 534 bp, Vibrio cholerae BJG-01
atgaaaataattaattataaagagttatttgtctttgacagggtgaagaaaacaggttttttacaagatttcatatctggcataaacattataagtggtcgaaatacatcggggaaaagcacgcttattcagagcttactatatgtatttggcatcaacgatgaaaaagaaaatctcgaagatatcattactgattttacggttttttctctacgttttgaaattgaaaataacggggttaagtctgaatatacgattattagagagagtgataatgtatatgttaagtctccaaatggtcgcgtagatagctttcgtggtgtatctagtaatatttcaatcgaacatacaaaattaaaggtttttgtttcagaactctttggtttttcattgtacttagagcagcagggtaagatgaaaccagcttctttagaggtgatgtttctaccttattatgtttctcaatcagttgggtgggtatatcttcgcagctcattttccaatttgaacttttataaaaattttaaagaagat

SEQ ID NO: 92820 - DNA, 1089 bp, Vibrio cholerae HE-25
atgggtttagctgaagcgttgatcagtattccacagtctgaaagaggcggtgaaattgcacaacgaggttttgattaccaaacttgttgggcattgtcacagatgttggagtacgaactggatggaaaggactatgtgtttatctttgaatatcacgatgacgtactcattttagatagtgaagatgaccctcaagatttgacctttgcccaagttaagaccagagagtcaaattggactgtgcataatttactaaagagcaccgagaaaaagccaatatcaatcattggtaagcttttcttacatcagaaaaatttctcaggctattcacccaagttactgttcgtaaccaatgcttcgttcaacttccatactaaagctgggggaaagacctgttttgatgtaaatagcattgaaagtacagaccaagagaagtttaaacaagcaatcaaagaacaagtcgagttggagcaagaacatattgatttgtccactttaaggtttgttcagtcttccctcagcctagatgaccatatgacacacctaaaaggaaaactatgtgatttccttggaaaaaaatatggtgaaagcactacattgagtcctaacgtattggcgactttacttgagtctgagtgtaggcaaaaatctaaattcaaatcggcagatattgctaactttatggatttagtcactcgaaagggcttttcttcaaaagcattcaataatgttatcgaatctcttaatgccagtaacagcctgaagcctgactgggagatggcagagcctgtttttaaagatttaaacaaaggtgcactacaacttatacatctgaaggcatcgttctcacaaatctgtatcgacttgaataagaacaaaaaaactccatcaagtgtatatttagagcatgcaatcagtctttatgaccaaatcaaaatagataaagaccttaaattttatatcactgaaacaattgtcaatattgatgcgctttgtccggattatacaatgacactaaatttaggaaagaaagagtgtatcgttgtctattcaataatccagaagctgttagaggaaggtcataaatga

SEQ ID NO: 92821 - DNA, 1650 bp, Vibrio cholerae HE-25
atgaaaaggatctattttaaaagcgctcacatattatctcttcgcgataagaaagggttcttttttgagttctcaccaaatgtgaatattatatccggtgaaaatgatacaggtaaatctagcttcatcaagagcttatatcatacactgggagctgatattcgtcttgataaaaaatggaaaaacgacaactttatatcaaaagtaatcatccacgttaaaaatcgagattatgcctttattcgtcataataagcgtatttctatctttgacctcacagaaggacaaaggcatttagttacatctaactcgcgttcagatatagctgagattgtacgtgatatttttgacttcaacttagaattggtcgtaaagaaaaccgctatacaagcacaagctctaccagctagcctctacttgcctttctatattgatcaagacaacggttggggtaaagtcttagactcatttagcaacctagctatgtataccgattggcaaaagaatattcttcacttccatgcaggaattaagccgaaagaatattacaagttacaaggtgagatgaatttaattgaccttgaccttggtgaaatattcgcaacgctaaaagctctagaagcagcgaaaaaacgattcgaagcttcattcggcagagtattgtttgatgtggatgttgagtactatgaagagttactaggacgttttctgagtaaatgtcaggaacttcatcaggaagaaactgcatacagaataaagctaatagaactactttctcatcgggacgagattgtatctgagattgaagaatgcaagcgacaacttgacgataatgatattgactcactttctacatcggcaggactagatgccaaatatactgttcttgcaaatagagaaaagttactggaaatcatacctgaattgtatgaacagaaatcagtttatgatgaaaagatagtcaatatcaaagaagaacttagaagtgctcagaaactaagctccaaacttaagacaatgctgcaagaagttaaagaaaacttaacgttgcaagacataattaaatctcaggctagtaaacaagttgagtttacattcgatgagcagataaaagaactacatgaaaaaataggtcaacttaatgcgactaagaacactcttgctaagaagatatctgaattcactgataaaaagcgcactcaagaaattaatgataaattcaaagagtctttgaaatatgctcaaacagaattaggaatacaagaacctgtattggggacaattcttcagtacggaaatattacaaaaagtgaaacaggaagccgtggacctagagcaattcttgcgtatcactatgctcttctaaaaacgattgaagagaaatcaacgatacctatgcttccagttgtaattgattcaccaaagcagcaagacccagacaagaacacaactaaaaagctatttgatttgtgcattgatggtttatcaaataaaaatcagttgattatcggctcagtctcctttgagcgagacactgatgaattccaaacattgacaatgaccgacaagtacagtttgttgaagccaaacttgtacgatgaagtttatgaacagataatgccgctatataagcaggtcgcatttccatga

SEQ ID NO: 92822 - DNA, 1089 bp, Vibrio cholerae O1 str. 87395; identical to SEQ ID NO: 92816

SEQ ID NO: 92823 - DNA, 1650 bp, Vibrio cholerae O1 str. 87395
atgaaaaggatctattttaaaagcgctcacatattatctcttcgcgataagaaagggttcttttttgagttctcaccaaatgtgaatattatatccggtgaaaatgatacaggtaaatctagcttcatcaagagcttatatcatacactgggagctgatattcgtcttgataaaaaatggaaaaacgacaactttatatcaaaagtaatcatccacgttaaaaatcgagattatgcctttattcgtcataataagcgtatttctatctttgacctcacagaaggacaaaggcatttagttacatctaactcgcgttcagatatagctgagattgtacgtgagatttttgacttcaacttagaattggtcgtaaagaaaaccgctatacaagcacaagctttaccagctagcctctacttacctttctatattgatcaagacaacggttggggtaaagtcttagactcatttagcaacctagctatgtataccgattggcaaaagaatattcttcacttccatgcaggaattaagccgaaagaatattacaagttacaaggtgagatgaatttaattgaccttgaccttggtgaaatattcgcaacgctaaaagctctagaagcagcgaaaaaacgattcgaagcttcattcggcagagtattgtttgatgtggatgttgagtactatgaagagttactaggacgttttctgagtaaatgtcaggaacttcatcaggaagaaactgcatacagaataaagctaatagaactactttctcatcgggacgagattgtatctgagattgaagaatgcaagcgacaacttgacgataatgatattgactcactttctacatcggcaggactagatgccaaatatactgttcttgcaaatagagagaagttactggaaatcatacctgaattgtatgaacagaaatcagtttatgatgaaaagatagtcaatatcaaagaagaacttagaagtgctcagaaactaagctccaaacttaagacaatgctgcaagaagttaaagaaaacttaacgttgcaagacataattaaatctcaggctagtaaacaagttgagtttacattcgatgagcagataaaagaactacatgaaaaaataggtcaacttaatgcgactaagaacactcttgctaagaagatatctgaattcactgataaaaagcgcactcaagaaattaatgataaattcaaagagtctttgaaatatgctcaaacagaattaggaatacaagaacctgtattggggacaattcttcagtacggaaatattacaaaaagtgaaacaggaagccgtggacctagagcaattcttgcgtatcactatgctcttctaaaaacgattgaagagaaatcaacgatacctatgcttccagttgtaattgattcaccaaagcagcaagacccagacaagaacacaactaaaaagctatttgatttgtgcattgatggtttatcaaataaaaatcagttgattatcggctcagtctcctttgagcgagacactgatgaattccaaacattgacaatgaccgacaagtacagtttgttgaagccaaacttgtacgatgaagtttatgaacagataatgccgctatataagcaggtcgcatttccatga

SEQ ID NO: 92824 - DNA, 1089 bp, Vibrio cholerae O1 str. EM-1676A
atgggtttagctgaagcgttgatcagtattccacagtctgaaagaggcggtgaaattgcacaacgaggttttgattaccaaacttgttgggcattgtcacagatgttggagtacgaactggatggaaaggactatgtgtttatctttgaatatcacgatgacgtactcattttagatagtgaagatgaccctcaagatttgacctttgcccaagttaagaccagagagtcaaattggactgtgcataatttactaaagagcaccgagaaaaagccaatatcaatcattggtaagcttttcttacatcagaaaaatttctcaggctattcacccaagttactgttcgtaaccaatgcttcgttcaacttccatactaaagctgggggaaagacctgttttgatgtaaatagcattgaaagtacagaccaagagaagtttaaacaagcaatcaaagaacaagtcgagttggagcaagaacatattgatttgtccactttaaggtttgttcagtcttccctcagcctagatgaccatatgacacacctaaaaggaaaactatgtgatttccttggggaaaaatatggtgaaagcactacattgagtcctaacgtattggcgactttacttgagtctgagtgtaggcaaaaatctaaattcaaatcggcagatattgctaactttatggatttagtcacccgaaagggcttttcttcaaaagcattcaataatgttatcgaatctcttaatgccagtaacagcctgaagcctgactgggagatggcagagcctgtttttaaagatttaaacaaaggtgcactacaacttataccgctgaaggcatcgttctcacaaatctgtatcgacttgaataagaacaaaaaaactccatcaagtgtatatttagagcatgcaatcagtctttatgaccaaataaaaatagataaagaccttaaattttatatcactgaaacaattgtcaatattgatgcgctttgtccggattatacaatgacactaaatttaggaaagaaagagtgtatcgttgtctattcaataatccagaagctgttagaggaaggtgataaatga

SEQ ID NO: 92825 - DNA, 1650 bp, Vibrio cholerae O1 str. EM-1676A
atgaaaacgatctattttaaaagcgctcacatattatctcttcgcgataggaaagggttcttttttgagttctcaccaaatgtgaatattatatccggtgaaaatgatacaggtaaatctagcttcatcaagagcttatatcatacactcggagctgatattcgtcttgataaaaaatggaaaagcgacaactttatatcaaaagtaatcatccacgttaaaaatcgagattatgcctttattcgtcataataagcgtatttctatctttgacctcacagaaggacaaaggcatttagttacatctaactcgcgttcagacatagctgagattgttcgtgagatttttgacttcaacttagaattggtcgtaaagaaaaccgctatacaagcacaagctctaccagctagcctctacttgcctttctatattgatcaagacaacggttggggtaaagtcttagactcatttagcaacctagctatgtataccgattggcaaaagaatattcttcacttccatgcaggaattaagccgaaagaatattacaagttacaaggtgagatgaatttaattgaccttgaccttggtgaaatattcgcaacgctaaaagctctagaagcagcgaaaaaacgattcgaagcttcattcggcagagtattgtttgatgtggatgttgagtactatgaagagttactaggacgttttctgagtaaatgtcaggaacttcatcaggaagaaactgcatacagaataaagctaatagaactactttctcatcgggacgagattgtatctgagattgaagaatgcaagcgacaacttgacgataatgatgttgactcactttctacatcggcaggactagatgccaaatatactgttcttgcaaatagagagaagttactggaaatcatacctgaattgtatgaacagaaatcagtttatgatgaaaagatagtcaatatcaaagaagaacttagaagtgctcagaaactaagctccaaccttaagacaatgctgcaagaagttaaagaaaacttaacgttgcaagacataattaaatctcaggctagtaaacaagttgagtttacattcgatgagcagataaaagaactacatgaaaaaataggtcaacttaatgcgactaagaacactcttgctaagaagatatctgaattcactgataaaaagcgcactcaagaaattaatgataaattcaaagagtctttgaaatatgctcaaacagaattaggaatacaagaacctgtattggggacaattcttcagtacggaaatattacaaaaagtgaaacaggaagccgtggacctagagcaattcttgcgtatcactatgctcttctaaaaacgattgaagagaaatcaacgatacctatgcttccagttgtaattgattcaccaaagcagcaagacccagacaagaacacaactaaaaagctatttgatttgtgcattgatggtttatcaaataaaaatcagttgattatcggctcagtctcctttgagcgagacactgatgaattccaaacattgacaatgaccgataagtatagtttgttgaagccaaacttgtacgatgaagtttatgaacagataatgccgctatataagcaggtcgcatttccatga

SEQ ID NO: 92826 - DNA, 1074 bp, Vibrio fischeri SR5
atggcagataatccactcgcagaagctcagcgtgaatccgctggagcgagtacatttggtaagtataacttccagtttcactgggctttatgtgaaattattgaaaaacataaacagcaaaaagaatatgcgttacttattgagcatcatgaagatgtagttattgctgaaggcttgaatgcttcaagtgcgacttttgagttctatcaggttaaaaatcaatctgccacatttacacctgcaaacttaaccaaacggaaaaaaggtaataatgagaaactaaaaagttctgtgcttggaaaattactagaatcttgcataaatacacagtacgacaatagaattacaaaaattgggttagtttcctctagtggattttcgttgaaaaccgatgcagatttaacattagacgttatcaaggtcggggatataactgaagaggatcttacaacactaactgataacatccagagcgaactaggaattacggttctgcctgaaaatttgcagtttatcgttcctaatatacagctgaaaaatcaagaagattacgtattatcacactttgctcgtttggtagataagttgtttcccgccgctctatgtaatcctgtaaatatctatcgttcagttattgatgaaatggggcgaattggccgtattgaatatgactacaaagaatggactcggcttttagaaaacaaatctctaacttcgactcaagtacatgacgtgattatccaacatacaaaacacccttgtgtagatgacttgaaaagtaacttcgacgacttagcaagagatcttgggtggaaatcaagacaaaagcggagctttaagagcaggttagctttaatagctctgagtagagctggctttatgacctctttagacattgagctaactaacttgtttcaagcttcgcacgacaaagttgccgaagaagattactcggatgatacaacataccttgaagccctgcgtagccaagcaattactgatggcttactagctcgagttaataatgaggatgagctgttactagagatcatctactgcttattaaaggcttaa

SEQ ID NO: 92827 - DNA, 1728 bp, Vibrio fischeri SR5
atgaaaggcttacaatttcaacgtctagttctattatccgattcgaaaagaacggcgaatcagttcagctttccgaagagattcaatctcgttacaggaaacgacaatagtattggtaagtctactctagttaaaagtctcttttgggctattggttgtgatcctcaatttgacgttaattggaagtctaatgatgtaaaagcaattctgtacttcacggtaaatcagaacaagtacgtcgttagccgttatgctgatggaatttactttggttcagagggtgagccgttaaccaagtattctaaagttacaggtcagtttgctgaagactttgctaaagtagttggatttgatctaatgcttgcaaataaacaagacgggattgattgccctcctccggcgttttacttcctaccattttatattgatcagaaaaaaagttgggacgagccttggaacggatttgaaaaattgcaacagtatgcgaatttcaaacagaatcttatcaagtatttctgtggttacttgcctaaagagcattttgatctcgaagaagagatctttgaagagaaagctctagagaaagaagcaaatcagcaagttgagcgcattactgaagcagtaaccttactagaagagattgccccagagcaaactattgctatcacaccagaggagttcgaaggtattcaacatgagattgaagaagagcttgctgctttttcttcttctcaatcgaacctatacaagttgcagtccctactagctaatgagattcatgagctagaacaacagcttgttattgcgaacacttcggccaaagaacttgagtacgactatactttcgctgtagagaacatccctacagactctcttgagtgcccactgtgtggtgtagagcatgacaattctttattaagtcgtgcaggcctgttagctgacaaagaaggtattgaacaacaggcagacaaaattaaatcgttgctcgaaaaaaaaatggaagagcgaacagcgcttaaccaagaactagatttcgtcacatctgagattgagcgtattaatgacaaatacttaaatgaagatgctgaagaacagcaatcagacgagcacaaagtgcactttgagcaagcaattcacgctgtttctcaacataaagtaaatcaaaacgtgactcgtaagaaagaaggttttcagctaaagtctaagcaagctaacgacaaccaaaaagagctaaagaaggcacagagaaagcttgttaaaaaggctgcacgagatgaactaaatgagctgttcatgggtaacttagtagaaagtatcaactctttgtccgctagaggtgtaaacctcgatggcgttaaagcaccaatgaattacaaaaaaattcttggtggtggtgctgccgaaggtacacggggaacgctagcctatcagttggctgtgcttcgtcaaattgactacgccaactcatgcgaaattgccccttttgttattgatacacctaatcaacaggaacaagcgaagcatcgatatgatcaagttatggacgtacttaatgaaaacatccctaaaggttatcaagtaattttatgtgcaatggatgatgtggctttagacaactataagcaggatgctcatatcattaagttggacaataaccgcctattgcaacatgaaccttatactcaacttcgtactgagtatgaacaagtcgtcttaagcaacaggtaa

SEQ ID NO: 92828 - DNA, 1305 bp, Vibrio harveyi 1DA3
atgtgtgtgctatgcagattcttgttctcaaaatttgattgtataggtacatgttgctatgcaatatgttttaataggggcaattgtattgcgatatgtatctacttgatattgaaaatcaatttgagaattggtctatttatgagcaaagagttacacaatgaaaccccaagggagcaggatggcagagattcttttgagcgctacagagctcaagttagatctgcgtcaatagcagctcttacaattttggaaggtagtgaagttgatcgagtttattgtgatttgcatgatgattttgttaagcgaagaagtgatggtggggggtatgacttttaccaagtgaaaacaaaatcaaaacaaaatcacaactggtcattaaacgaagtgtttggcattaagtcgaggggtaacactcaatcaccagaggacatagaaaatagttttgctagcaagctactgttacatactatagtgtttgatgacaactgtaattccgttatttttcagactaatattaataatcatgatcatatagaaagtgttattaaagacataagttctggagaatttaccaataagcatactaaaatactaatagatagtttcaatgaatgtatatcaaaagagaatttatattcagaagatgaaattaaaaaacgattaaaaaaattaaagtttgaaactgatgttcaatatctgaaatcaaaaaataataattttgatgctatagttagagataaaatatatagatatagtgaagttgatttagattattttgatacacaagaaattattatgaaattactagatttggtttctaaaaaatctagcggaaaaatagatgaatatacactagaaaatatagaaaaccaagctagtatagcaatcgatgatttattgtctattttaagtatttcaaaggaagcgtatgagtcattaaaaaatggtggagaccctaaagcaataaaaaacgtctctatcattcaaagaagcttacaagttgtcggtgttgaagatgaaaccataaaatattgctctaaatgtaagttggattgggatgagtggtatagaaataatagacatatattatttggtttagacctgattacaattactgataagattaagtatgttctaaaagaaaatttaaaactaaatggtggatatgttaatttaagagaattgtctaaaccaataaaagatgtattaaaagatcttgaagatgaaggcattttgtttggtttgaatggtgatttgatattgggagcaatattttctgaaattgtgagaatgaaatcatga

SEQ ID NO: 92829 - DNA, 1764 bp, Vibrio harveyi 1DA3
atgaagctaataagcataagaatcgtaggtaaaggggtctctggatggttttctgatgaattaaagtttggcgatcatataacacatttatgggggccaaatggatgcggaaaaacaccaattgtacagtctgtagctttttgtttaggttatccttgtgtatttagagaagatatatataaatattgtcattatgctattttaaaagtagaagttaataacgatattttaaaaattaaacgaaagattgagtctaatcttgaaattgaagttattgagccaaatggtggtgttcaaacattttttaatgaagatgaatattctgattacttattttctattttagggctagaaaggccaagtattgtatcgataggtaataaaataactaaaccatatttgtctacattattacctataatatatttagaccaagatgatggatatcgtaaacattattattctaaatctaacttcataaaagatcaatatgaggaaattattcgagtattattttctcttccagccaaaaattcatttaataaaaagaaaaagaaactggaagagaaaggcaaactagatcttcttgatcgggaagtaaataataaattcaaaaggcttgaaactcaaagagctgttgtagaaagtgtgaataaaacttctcaagaaatacatgatgaaatagtaatctttgagactcaattagatgatttaaaaaactctttttctacacatgatgaatccctttctgcacttgataaaattatatcatctcacagaaaagcaataaataagataaattcagaaatagaagatctaaggaataggaatagaggtatcgataaaataatctctgagattaagactgagattgaaactctaaatttaaatgaagaggctcgaagagtttttttaaactctggagagatttgtgtttcttctaattgcaagcttttctctaaaagttcagattcatatagtaagaatttactatacttaaaagatcaaattaaagatttaaatattaattctaaatctgatgatgataaggtcgttgaattgattgaacgaaaaaaagtaattgagaacctaatatcagaaatagtgaaggaaagaaacgaagcaataaacaaaagtgaagcacattttttagttgatactatatctgaaattaaaaatacattatttgagttacaatcagattatgaaaaaatagacattttagaaaagtatgaatcacaatattttgatgcattgagaagaagaaatattactcttgataattataattcattatctaatgacagagtttctatcccaaatattatcaagttaaaatcaaggcttaaagagtgcctaattaaatggcttacatcaattagaataaaaaacattaatcttgatataagatggaaaaatgactttatacctatttttggtacggaaactatagagcaaataaaaggtagtactagggctagagcggtgattgcatatcatgcagcattaatggaagttctacttgagcaagaagagaataatataaattttgttatttttgacacgccaaagcaacatgaaattcatgatgatgatttagataactttatgtctgacatgaaaaaactatgtgataaacattcgcttcaatttattttctcaacaacggaatataaatattttggcgacgagaaagataaaaaatgggttcctaaatatccaggtctagagcaaaatatgtttttaactacaaaaggtgagtag

SEQ ID NO: 92830 - DNA, 1074 bp, Vibrio parahaemolyticus 3259
atggcagacaatccactcgcagaagctcaacgtgaatccgcaggagcaagcacatttggtaaatataacttccagtttcactgggctttgtgtcaaatcattgaaaaacacaaacagaaaaatgaatatgcgttactgattgagcatcatgaagatgttgttattgctgatagcttggatgcttcaagtgcgacttttgagttttatcaggttaaaaatcaatctgccacgtttacacctgctaacttaaccaagcggaaaaaaggcagcaaagaaaaactaaaaagttctgtgcttggaaagttactagaatcctgtataaatacacagtacgaagatagaattacaaaaattggtttagtttcctctagtgggttttcgttgaaaaccgatggagatttgacattagatgttatcaaggtcggtgacattgctgaagaggatcttacaacactaactgataacatccagagcgaactaggaattacgattctacctgaaaatttgcagtttattgttcctaacatacagcttaaaaatcaagaagattacgtgttgtcacactttgctcgtctagtagacaagctgtttcctggagcgctatgtaatcctgtaaatatctatcgttcggttattgacgaaatggggcgaattggccgtattgagtatgactacaaagaatggactaagcttctagaaaacaagtcgttaacttcgactcaagtgcatgacgtgattatccaacacacaaaacacccttgtgtagatgacttgaaaagtaacttcgatgacttagcaagtgaccttgggtggaaatcaaaacaaaagcgcggctttaagaacaagctagttttactcgctttaagtagagctggttttatgacctctttagatatagagcttattaacttatttcaagcttcgcatgaaaaaattgacgaagagagttactcggatgatacaacataccttgaagcactgcgcaaccaagcaatcgcagatggcctactagctcgagttaataatgaggatgagctgttattagagatcatctactgcttattaaaggcttaa

SEQ ID NO: 92831 - DNA, 1236 bp, Vibrio parahaemolyticus 3259
atgaaaggcttgcaatttcaacgtctagttctactgtccgattcgaaaagaacggcgaatcagttcacatttccgaagaggttcaatctcgttacaggaaacgacaatagcattgggaagtctacgttagtcaaaagcctattttgggctattggttgtgcccctcattttgatagtgagtggaaatcaaatgatgtaaaaacaattctgtacttcacggtaaatcaaaataaatacattgttagccgttatgctgatggcatttacttcggagcggaaggatcgtcattaactaagtactcgaaaattacaggtcaattcgctgaagattttgctaaagttgtaggttttgacttaaagctagccaataggacggaaggtatagactgcccccctcctgctttctatttcctaccgttttatatagatcagaaaaaaagctgggatgaaccttggaatggttttgaagggcttgggcaatacgctcgatttaaacaaaacctgatcaaatatttcagtggttatttgcctaaagagcactttgatcttgaagaagaaatttttgagcagaaatctattgaaaaagaagctaatcaacaagttgttagaataacagaagcaatagatcttcttaaagaaatcgctccagagcagaccgtcgcaattacttcagatgagtttcagagcattcaacgtgaaatagaagaagaattggctagcttttcatctagtcaatcaaatctgtacgaactgcaatctatattagctaatgatattcatgaattggaacagcagcacttaattgctagtgcttcagccagagaattgaatgaagactacacatttgctgtcgagaatattccatcagactctcttgaatgtcctttatgcggtatagagcatgataattctctgttaagtcgtgcaggacttttggctgataaagaaagtattgagcaacaagcagataaaattaaatctctactcgaaactaagtatcaggaacgcgatgatctcaatcaagagatcagtttcgttactgctgagattgaacgtataaacgaaaaatacttaaaagaagattctgaggagcagcaaacagaatttgaacaagctattcacgctgtttcgcagcataaagttaatcaaaatgttactcaaaagaaagctgtcagctccaatcaaaacaagctaacgagctgcaaaagaaaattaagaaggaacaaaataagctag

SEQ ID NO: 92832 - DNA, 1074 bp, Vibrio parahaemolyticus EKP-008; identical to SEQ ID NO: 92830

SEQ ID NO: 92833 - DNA, 1236 bp, Vibrio parahaemolyticus EKP-008; identical to SEQ ID NO: 92831

SEQ ID NO: 92834 - DNA, 1089 bp, Vibrio parahaemolyticus
atgggtttagcagaagctttgattagtattccacagtctgaaagaggcggtgagattgctcaacgtgggtttgactatcaaacttgctgggcgttgtctcaaatgctggaatatgaactagatgaaaagaactatgtgtttatcttcgaatatcatgatgatgttcttattcttgatgacgaagtttccccaacagacctcacatttgctcaagtaaaaacaagagaaaaacactggactgcatcaattctgagtagtagtactaagaagaaacccgtatcgatcattggtaagttatttattcattataagaatttcgccgaatattcacctaagctactttttgttactaatgcctctttcaatctgtgtgaggaaaacggtggtaagtcttgttttggtgcaaatgaagtcaaaaaagagcatcagacgagctttaagaaagcaatcaaagatcaagtagagcttgatgactccagtatcgacctttctgtcatgcgatttgtccaatcctcattaagcctagatgaccacattacacatctaaaaggtaaactatgcgatttccttagcaagaagtttggcgatagtactaacctgagtgtcaatgcattagcatctttgcttgaacaggcgtgtcgagacaaatccaaggtaaaatccgcagatattattgatttttcagatcttatctctcgaaaaggtttctcatcagaagcgttgaacggtgtacttgattccttgaatgtaagtaatagtttaaagcccgattggaacaaagcgagtcccctattcactgatcttggcaaaacatcgctccagcttattatactgcaagccactttctcacaagtttgcatcgaacttaaccaaaacacaaaaaatccatcgaccgtatatctagagtatgcaattagcctttacgatgaggcgagtgtccactcggatttgaaactatacgtgactgaaactatgcacaaaattgatgcactttgtccagattatgcattgactctaaagtcagggaagaaagaatgtatcgttgtttactcagtgatccagaagctatttgagggaggtgaagaatga

SEQ ID NO: 92835 - DNA, 1653 bp, Vibrio parahaemolyticus
atgaaaagcatctacttcaaaagtgctcatatattatcccttcgcgataagaaagggttttctttcaagttctcacctgacataaatatcattacaggtgagaacgacacaggtaaatctagctttattaagagtctatatcatacattaggtgccgatattcgactggataaaaagtggaaagaagatgactttgtttcaaaagttgttatttgtgtcagtaatcgtgactacgcgtttcttcgccacgaaaaacgtatttccatcttcgatataacagaaggacaagagcatcacttagtgacctctagttctcgcacagatattgctttaactgtacgtgatatttttgatttcaatttggaacttgtgacaaaaagtaatttggttcagggacaagcacaaccagcaagtctctatcttccttactatattgatcaagataacggttggggaaaagttttagattcatttagcagcttggcaatgtataaggactggcaaaataatatcttgaattttcatactggtgtaaagccaaaggaattttacactttacaaggaaagattaatttaattgatatcgatcttgttgaaatccgagcgacgttaaaagctctagaggcagctaagaagagattcgaagagtcatttggaagagtactttttgatgtggatgtacaatattatgaagagctgcttgagcgctttcttcacaagtgccaagacctacataaagaagagacagaatacagaattaagcttattgaagtattgtctctacgggatgaactagtagcagaaatcgaagagtcgaaaagacagctcgacgaaaataatatagattccttgccaccatcagcaggcttagaagcgaggtatgcggtacttgaacacagagacaagctattgcaaatcataccagagttgtatgagcaaaagtctgtatatgatgatcaaatcactaaaataaaagaagatttgaaaaatgctaaaagactaagctcagaactcaaagagatgcttcaggaagtcaaagagcaattgtctcttcaggacgttattaactctcaggcaagtaagcaggttgaggtgactttcgatgagcaaattaatgaattgctgcaaaaaattggtgaattggatgttgctagaactaagctttcaaaagaaatagcaaagttcgaagataagaaacgagcaaaagaaatcaatgacaagtttaaagagtcgctgaaatttgcacaaactgagttaggtatcaaagatcctaaagttggaactattcttcaatatggtccgatttctaagagcgaaacaggcagtcgtgctccaagagcaatattggcttatcactatgctcttctcaaaacaatagaagacaaatcgacaagccctatgcttccagtggtaattgactcgcctaaacagcaagatccagatccgcgcacaacgaaaaagctattcgatttatgtattgatggtctatcaactaattgtcaactaattatcggctctgtttcattagaaagagaaacgaatcagtttaaaacgctgactatgactgacaaatacagtctgttaaaaccagagctttacaatcaggtttatcaagagattatgcctctttatcaaaaagctgcgttatcataa

SEQ ID NO: 92836 - DNA, 1092 bp, Vibrio parahaemolyticus VP766
gtggggcaaggaattaatggcggagttgaggctgggcgtgggttttcgtttcagaaatgcgcagcgttatgcctattgctggatgactttccttcgttcggtaaaaggaagtacttcctagcatttgagcatcatgatgacttcttattcgcgttttatgatggtaatgacgaattggatgaggtcaaggcttaccaagctaagaaaaagtccttgtcttctagttggggaacaaacgacaaactagccgaaatcctatgtaaattaacaatgactggtcagcggattagccaagataatagtataaataagtctaaaaattatagtcataggttaagctttatttctaatgcggaaattaagctgactaacggtaaagctgggaaaaaaaagaagtcgattagcgtaaaggaagatactacgccaattagatttttgacgttggataaagaaatacagattaaactagaagatataattaactccaacgcagagccaaatgatatttctgaaatgaatggtcttgagtttgctaatattagtttaaatcacaatcataaagtcaataaagattaccttgtagggaaaatgacgagtatgtttggtgataaaatttcagattatgtagcagcattagatgtcttaatgactctgtttactgactcagaactagagtttaataaaaatggtttgccagagttaagtcattcagctaagtgggttgcaaaaagtcaaattgaaaatgcaatggatgtcttaactagtcaaaaaaaagcttataatctttggcgaaagtatgctgaagtgttagggaaaaatcttaaaataaagtttaggtattcaaagaattatgaagaacatatagataattgctttgatggttttaagtctttacgtaactctgagcttcttaaagtaaagtcgcttgtaaaagaacataaagatattgtagaagacgagtataacgaatgtgatggtattatttcattgattgaatatataagaagtgaatataaaatatctttagagtcgcatatcattgtatttgcagttattgcatcttacgtagagatggaggacatctgtggttaa

SEQ ID NO: 92837 - DNA, 1749 bp, Vibrio parahaemolyticus VP766
gtggttaaagttaattacaatagtttgttggtatttaatataaataaagataagagcttttataccacatttaataacggggttaatattgtttatggacggaatacgtcaggaaagagtacgttaatccaaattattaactactcaatggggataaatgacgcaaaggataacctttctgacattttgaaagaagacgtagttattaggttaacattaaccttgtctgtaaatgcaacctgtaaagaagtagtttttgttaggaaaaacgattcattaatagttaaggttgaaggcgaacctatcaagcgattcgatggcgtctctggaaatacttcttatgaatatcgaaaatataaagagttcttcgctaatcttctaggcttcgatttacatttagagagcaagggggatgttagtttagctcccttagaggcagcttttttaccattttatatatctcagtcagtagggtgggtatacctaagagagtcaattggaaactaccgattttataagaactttaaagaggactatttagactactgttttggaatttctaatcaatcagatagagccaaacgctatcaactagaagagaaaagaaaggaatataaatcagaaataaagtttatagaagagtatcacaaaaagcatccagaattagaaatatcaaagaggatatctcagagatttgaaaatggtgcttatgaatttattgatgactttaacaacatcaacacttctctgattgagcttgagcggcaacatattgagttagtcaacaagaaatcttcgttgctcatgaggaatagtgttttacgtaaggttcatagcgctcagaataaacaacgcccaaaattggattcatgtcccgtgtgcgaacagtctctaccaagtacagtagaagcactatataaatataatcaagagcttaatgatactgtacatcagaggtctgtggttgatgagaaattaaaatcagttcagtcaactataaattctgtagaaaagaaactatccgagggtcgaagggagctagtcggtaagtataaagtcttacaaaagctcaaaatgcttaatataacctttgatacttggatggagtatgaatccatacggcggctgtcagaagagctcgatttaaaactaaacaaggtgcaaaggaagctcgacttagttttaggtgagctgaaaggcatagaccaaagcgatattgaacgggaaagaaatatcgttagccgattatttttgcagaaatttaagagtaatgctaaagcattgcaggctacgatacctatgtcaccaagataccgtgatgtgtatgaaatcaattcttttccagcgcaaggtgttgagttacacaaactaataatggcttatcacttttctttttgggagctattgaaagacaatgaaaaaatgcacaggctaccttttgttttagatgcagtctttaaagaagatattgacgaagttagtcgggaaactatcttcaactttttgtccactaagaactcacgtgatgagcaaataatttttgcagtcgcagacgttaaggacaatcagcccgctcctacttctagaacacattttatagaagaagttaatgaaatttatttttcttccagcgcaaatcttatctgtattgggaacgctgaaaagcaacgagcatttttatctgaagctccaactgagcttgaattggatttgattgaagatacattagaaatatcagaagcatactag

SEQ ID NO: 92838 - DNA, 831 bp, Vibrio parahaemolyticus 901128
gtgtttgatgacaactgcaattccgttatttttcagactaatattaataatcatgatcatatagaaagtgttattaaagacataagttctggggagtttaccaataagcatactaaagtattaatagataattttaatgaatgtatatcgaaaggcaagtcatattcagaagatgaaattaaaaaacgattaacaaaattaaaatttgaaactgatgttcaatacctgaaatcaaaaaataataattttgatgctatagttagagataaaatatacagatatagtgaagtagatttagattatttcgacacacaagaaattattatgaaattactagagttggtttctagaaaatctagcgggaagatagatgaatatacactagaaaatatagaaaaccaagctggtatagcaatcgatgatctgttatctattttaagtatttcaaaggaagcgtatgagtcattaaaaaatggaggagaccctaaagcaataaaaaacgtctctatcattcaaagaagtttacaagctgtcggtgttgaaaatgaaaccataaaatattgctcaaaatgtaagttagattgggatgagtggtatagaaataatagacatacattatttggtttagatctaattacaattactgataagattaaatatattctacaagaaaatttaaaactaaatggtggatatgttaatttaagagggttgtctaaaccaataaaagatgtgttaaaagatcttgaagatgaagatattttgtttggtttgaatggtgatttgatattgggagcaatattttctgaaattgtgagaatgaaatcatga

SEQ ID NO: 92839 - DNA, 1764 bp, Vibrio parahaemolyticus 901128
atgaagctaataagcataagaatcgtaggtaaaggggtatctgggtggttttctgatgaattaaagtttggcgatcatataacacatttatggggtccgaatggatgtggaaaaacaccaattgtacaatctgtagctttttgtttaggctatccttgtgtctttagagaagatatatataaacattgtcattatgctattttaaaagtagaagttaacaacgacgtttttaaaattaaacgaaagattgagtctaatcttgaaattgaagttattgagtcagatggtagtagtcaaacattttttaatgaagatgaatactctgattatttattttctgtattaggattagaaaggccaaatattgtatcgacaggtaataaaacaactaagccatatttagctacattattacctataatatatttggaccaagatgacggatatcgtaaacattattactctaaatctaacttcataaaagaccaatatgaggaaatgattcgagtgttattctctcttccagctaaaaattcatttaataaaaagaaaaagaaattggaagagaaagataaactagatcttcttgatcgggaagtaaataacaagctcaaaaggtttgaagctcaaaagtctatagtagaaagtgtgaataaaacttctcaagaaatacatgatgagatcgtaatctttgagactcaattagatgatttaaagaattctttttctacacatgatgaatcacttactgcacttgataaaattatatcatctcaccgaaaagcaataaataagataaattcagaagtagaagaactaaagaataggaatagaggtattgataaaataatctctgagattaagactgagattgaaactctaaatttaaacgaagaggctcgaagagttttcttaaactctggagagatttgtggttcttctaattgtatgcttttctctaagagttcagattcgtatagtaagaatttattatatttaaaagatcaaattaaagatttaaatattaattctaaatctgatgacgataagatcgttgaattgattgagagaaaaaaagtaattgaaaatctaatatcagaaatagttgatgaaagaaatgaagcaattaataaaagtggggcttatgttttagttgatactatatctgaaattaaaaatacattatttgagttgcaatcagattatgaaaaaattgatattctagaaaagtacgagtcacaatattttgatgcgttgagaagaagaaatataactcttgataattataattcattatctagtgacagagtttctatcccaaatattatcaagttaaaatcaaggcttaaagagtgcttaattaaatggcttacatctattagaacaaaaaatattagtcttgatataaagtggaaaaatgattttatacctatttttggtacggaaactattgagcaaataaaaggaagtactagggctagagcggtgattgcatatcatgctgccttaatggaagttctacttgagcaagaaggaaataatataagttttgtcatttttgacacgccaaagcaacatgaaattcatgatgatgatttagataactttatgtctgacattaaaaaactatgtagtaaacattctcttcagtttattttctcaacaacggaatataaatattttggtgacgagaaagatgaaaaatgggttcctaaatatccaggtctagagcaaaacatgtttttaactacaaaaggcgagtag

SEQ ID NO: 92840 - DNA, 1089 bp, Vibrio parahaemolyticus EN9701121
atgggtttagctgaagctttgattagtattccacagtctgaaagaggcggtgagattgctcaacgtgggtttgactatcaaacttgctgggcgttgtctcaaatgctggaatatgaactagatgaaaagaactatgtgtttatcttcgaatatcatgatgatgttcttattcttgatgacgaagtttccccaacagacctcacatttgctcaagtaaaaacaagagaaaaacactggactgcatcaattctgagtagtagtactaagaagaaacccgtatcgatcattggtaagttatttattcattataagaatttcgccgaatattcacctaagctactttttgttactaatgcctctttcaatctgtgtgaggaaaacggtggtaagtcttgttttggtgcaaatgaagtcaaaaaagagcatcagacgagctttaagaaagcaatcaaagatcaagtagagcttgatgactccagtatcgatctttctgtcatgcgatttgtccaatcctcattaagcctagatgaccacattacacatctaaaaggtaaactatgcgatttccttagcaagaagtttggcgatagtactaacctgagtgtcaatgcattagcatctttgcttgaacaggcgtgtcgagacaaatccaaggtaaaatccgcagatattattgatttttcagatcttatctctcgaaaaggtttctcatcagaagcgttgaacggtgtacttgattccttgaatgtaagtaatagtttaaagcccgattggaacaaagcgagtcccctattcactgatcttggcaaaacatcgctccagcttattatactgcaagccactttctcacaagtttgcatcgaacttaaccaaaacacaaaaaatccatcgaccgtatatctagagtatgcaattagcctttacgatgaggcgagtgtccactcggatttgaaactatacgtgactgaaactatgcacaaaattgatgcactttgtccagattatgcattgactctaaagtcagggaagaaagaatgtatcgttgtttactcagtgatccagaagctatttgagggaggtgaagaatga

SEQ ID NO: 92841 - DNA, 1653 bp, Vibrio parahaemolyticus EN9701121
atgaaaagcatctacttcaaaagtgctcatatattatcccttcgcgataagaaagggttttctttcaagttctcacctgacataaatatcattacaggtgagaacgacacaggtaaatctagctttattaagagtctatatcatacattaggtgccgatattcgactggataaaaagtggaaagaagatgactttgtttcaaaagttgttatttgtgtcagtaatcgtgactacgcgtttcttcgccacgaaaaacgtatttccatcttcgatataacagaaggacaagagcatcacttagtgacctctagttctcgcacagatattgctttaactgtacgtgatatttttgatttcaatttggaacttgtgacaaaaagtaatttggttcagggacaagcacaaccagcaagtctctatcttccttactatattgatcaagataacggttggggaaaagttttagattcatttagcagcttggcaatgtataaggactggcaaaataatatcttgaattttcatactggtgtaaagccaaaggaatattacactttacaaggaaagattaatttaattgatatcgatcttgttgaaatccgagcgacgttaaaagctctagaggcagctaagaagagattcgaagagtcatttggaagagtactttttgatgtggatgtacaatattatgaagagctgcttgagcgctttcttcacaagtgccaagacctacataaagaagagacagaatacagaattaagcttattgaagtattgtctctacgggatgaactagtagcagaaatcgaagagtcgaaaagacagctcgacgaaaataatatagattccttgccaccatcagcaggcttagaagcgaggtatgcggtacttgaacacagagacaagctattgcaaatcataccagagttgtatgagcaaaagtctgtatatgatgatcaaatcactaaaataaaagaagatttgaaaaatgctaaaagactaagctcagaactcaaagagatgcttcaggaagtcaaagagcaattgtctcttcaggacgttattaactctcaggcaagtaagcaggttgaggtgactttcgatgagcaaattaatgaattgctgcaaaaaattggtgaattggatgttgttagaactaagctttcaaaagaaatagcaaagttcgaagataagaaacgagcaaaagaaatcaatgacaagtttaaagagtcactgaagtttgcacaaactgagttaggtatcaaagatcctaaagttggaactattcttcaatatggtccgatttctaagagcgaaacaggcagtcgtgctccaagagcaatattggcttatcactatgctcttctcaaaacaatagaagacaaatcgacaagccctatgcttccagtggtaattgactcgcctaaacagcaagatccagatccgcgcacaacgaaaaagctattcgatttatgtattgatggtctatcaactaattgtcaactaattatcggctctgtttcattagaaagagaaacgaatcagtttaaaacgctgactatgactgacaaatacagtctgttaaaaccagagctttactatcaggtttatcaagagattatgcctctttatcaaaaagctgcgttatcataa

SEQ ID NO: 92842 - DNA, 1089 bp, Vibrio parahaemolyticus; identical to SEQ ID NO: 92840

SEQ ID NO: 92843 - DNA, 1653 bp, Vibrio parahaemolyticus; identical to SEQ ID NO: 92841

SEQ ID NO: 92844 - DNA, 1164 bp, Vibrio parahaemolyticus
atgagcaaagagttacacaatgaaaccccaagagagcaggatggcagagattcttttgagcgctacagagctcaagttagatctgcgtcaatagcagctcttacaattttggaaggtagtgaagttgatcgaatttattgtgatttgcatgatgattttgttaagcgaagaagcaatggtggtggatatgacttttaccaagtgaaaacaaaatcaaaacaaaatcacaactggtcattaaacgaggtgtttggcattaaatcgaggggtaacactcaatcatcagaggacatagaaaatagttttgctagcaagttactgttacatactatagtgtttgatgacaactgcaattccgttatttttcagactaatattaataatcatgatcatatagaaagtgttattaaagacataagttctggggagtttaccaataagcatactaaagtattaatagataattttaatgaatgtatatcgaaaggcaagtcatattcagaagatgaaattaaaaaacgattaacaaaattaaaatttgaaactgatgttcaatacctgaaatcaaaaaataataattttgatgctatagttagagataaaatatacagatatagtgaagtagatttagattatttcgacacacaagaaattattatgaaattactagagttggtttctagaaaatctagcgggaagatagatgaatatacactagaaaatatagaaaaccaagctggtatagcaatcgatgatctgttatctattttaagtatttcaaaggaagcgtatgagtcattaaaaaatggaggagaccctaaagcaataaaaaacgtctctatcattcaaagaagtttacaagctgtcggtgttgaaaatgaaaccataaaatattgctcaaaatgtaagttagattgggatgagtggtatagaaataatagacatacattatttggtttagatctaattacaattactgataagattaaatatattctacaagaaaatttaaaactaaatggtggatatgttaatttaagagggttgtctaaaccaataaaagatgtgttaaaagatcttgaagatgaagatattttgtttggtttgaatggtgatttgatattgggagcaatattttctgaaattgtgagaatgaaatcatga

SEQ ID NO: 92845 - DNA, 1764 bp, Vibrio parahaemolyticus
atgaagctaataagcataagaatcgtaggtaaaggggtatctgggtggttttctgatgaattaaagtttggcgatcatataacacatttatggggtccgaatggatgtggaaaaacaccaattgtacaatctgtagctttttgtttaggctatccttgtgtctttagagaagatatatataaacattgtcattatgctattttaaaagtagaagttaacaacgacgtttttaaaattaaacgaaagattgagtctaatcttgaaattgaagttattgagtcagatggtagtagtcaaacattttttaatgaagatgaatactctgattatttgttttctgtattaggattagaaaggccaaatattgtatcgacaggtaataaaacaactaagccatatttagctacattattgcctataatatatttggaccaagatgacggatatcgtaaacattattactctaaatctaacttcataaaagaccaatatgaggaaatgattcgagtgttattctctcttccagctaaaaattcatttaataaaaagaaaaagaaattggaagagaaagataaactagatcttcttgatcgggaagtaaataacaagctcaaaaggtttgaagctcaaaagtctatagtagaaagtgtgaataaaacttctcaagaaatacatgatgagatcgtaatctttgagactcaattagatgatttaaagaattctttttctacacatgatgaatcacttactgcacttgataaaattatatcatctcaccgaaaagcaataaataagataaattcagaagtagaagaactaaagaataggaatagaggtattgataaaataatctctgagattaagactgagattgaaactctaaatttaaacgaagaggctcgaagagttttcttaaactctggagagatttgtggttcttctaattgtatgcttttctctaagagttcagattcgtatagtaagaatttattatatttaaaagatcaaattaaagatttaaatattaattctaaatctgatgacgataagatcgttgaattgattgagagaaaaaaagtaattgaaaatctaatatcagaaatagttgatgaaagaaatgaagcaattaataaaagtggggcttatgttttagttgatactatatctgaaattaaaaatacattatttgagttgcaatcagattatgaaaaaattgatattctagaaaagtacgagtcacaatattttgatgcgttgagaagaagaaatataactcttgataattataattcattatctagtgacagagtttctatcccaaatattatcaagttaaaatcaaggcttaaagagtgcttaattaaatggcttacatctattagaacaaaaaatattagtcttgatataaagtggaaaaatgactttatacctatttttggtacggaaactattgagcaaataaaaggaagtactagggctagagcggtgattgcatatcatgctgccttaatggaagttctacttgagcaagaaggaaataatataagttttgtcatttttgacacgccaaagcaacatgaaattcatgatgatgatttagataactttatgtctgacattaaaaaactatgtagtaaacattctcttcagtttattttctcaacaacggaatataaatattttggtgacgagaaagatgaaaaatgggttcctaaatatccaggtctagagcaaaacatgtttttaactacaaaaggcgagtag

SEQ ID NO: 92846 - DNA, 1074 bp, Vibrio parahaemolyticus
atggcagacaatccactcgcagaagctcaacgtgaatccgcaggagcaagcacatttggtaaatataacttccagtttcactgggctttgtgtcaaatcattgaaaaacacaaacagaaaaatgaatatgcgttactgattgagcatcatgaagatgttgttattgctgatagcttggatgcttcaagtgcgacttttgagttttatcaggttaaaaatcaatctgccacgtttacacctgctaacttaaccaagcggaaaaaaggcagcaaagaaaaactaaaaagttctgtgcttggaaagttactagaatcctgtataaatacacagtacgaagatagaattacaaaaattggtttagtttcctctagtgggttttcgttgaaaaccgatggagatttgacattagatgttatcaaggtcggtgacattgctgaagaggatcttacaacactaactgataacatccagagcgaactaggaattacgattctacctgaaaatttgcagtttattgttcctaacatacagcttaaaaatcaagaagattacgtgttgtcacactttgctcgtctagtagacaagctgtttcctggagcgctatgtaatcctgtaaatatctatcgttcggttattgacgaaatggggcgaattggccgtattgagtatgactacaaagaatggactaagcttctagaaaacaagtcgttaacttcgactcaagtgcatgacgtgattatccaacacacaaaacacccttgtgtagatgacttgaaaagtaacttcgatgacttagcaagtgaccttaggtggaaatcaaaacaaaagcgcggctttaagaacaagctagttttactcgctttaagtagagctggttttatgacctctttagatatagagcttattaacttatttcaagcttcgcatgaaaaaattgacgaagagagttactcggatgatacaacataccttgaagcactgcgcaaacaagcaatcgcagatggcctactagctcgagttaataatgaggatgagctgttattagagatcatctactgcttattaaaggcttaa

SEQ ID NO: 92847 - DNA, 1713 bp, Vibrio parahaemolyticus
atgaaaggcttgcaatttcaacgtctagttctactgtccgattcgaaaagaacggcgaatcagttcacatttccgaagaggttcaatctcgttacaggaaacgacaatagcattgggaagtctacgttagtcaaaagcctattttgggctattggttgtgcccctcattttgatagtgagtggaaatcaaatgatgtaaaaacaattctgtacttcacggtaaatcaaaataaatacattgttagccgttatgctgatggcatttacttcggagcggaaggatcgtcattaactaagtactcgaaaattacaggtcaattcgctgaagattttgctaaagttgtaggttttgacttaaagctagccaataggacggaaggtatagactgcccccctcctgctttctatttcctaccgttttatatagatcagaaaaaaagctgggatgaaccttggaatggttttgaagggcttgggcaatacgctcgatttaaacaaaacctgatcaaatatttcagtggttatttgcctaaagagcactttgatcttgaagaagaaatttttgagcagaaatctattgaaaaagaagctaatcaacaagttgttagaataacagaagcaatagatcttcttaaagaaatcgctccagagcagaccgtcgcaattacttcagatgagtttcagagcattcaacgtgaaatagaagaagaattggctagcttttcatctagtcaatcaaatctgtacgaactgcaatctatattagctaatgatattcatgaattggaacagcagcacttaattgctagtgcttcagccagagaattgaataaagactacacatttgctgtcgagaatattccatcagactctcttgaatgtcctttatgcggtatagagcatgataattctctgttaagtcgtgcaggacttttggctgataaagaaagtattgagcaacaagcagataaaattaaatctctactcgaaactaagtatcaggaacgcgatgatctcaatcaagagatcagtttcgttactgctgagattgaacgtataaacgaaaaatacttaaaagaagattctgaggagcagcaaacagaatttgaacaagctattcacgctgtttcgcagcataaagttaatcaaaatgttactcaaaagaaagaaagctgtcagctccaatcaaaacaagctaacgagctgcaaaagcaaattaagaaggaacaaaataagctagtcaaaaaagctactcgtgatgaactaaatgaactatttatgggcaacctagttgaatctatcaattcattgtctgctacgggtgtaaaccttgatggcgttaaagcgccaatggattacaaaaaaatactaggtggtggtgctgctgagggaacacgaggaacacttgcttatcaacttgccgttcttcgccaaattgatcacgctaatccatgtgaaatagccccatttgttattgatacacctaatcaacaagaacaagccaagcatcgatatgatcaagttatggacgtgcttactgaaaacattcctaaaggttatcaagtcattttgtgtgcaatggataatgcggctttagacaactataagcaagatgctcatatcattaagttggacaacaaccgcctactgctacataaaccttatgctcaacttcgtgctgagtatgaacaagtcgtcttaagcaacagctaa

SEQ ID NO: 92848 - DNA, 1089 bp, Vibrio parahaemolyticus; identical to SEQ ID NO: 92840

SEQ ID NO: 92849 - DNA, 1653 bp, Vibrio parahaemolyticus; identical to SEQ ID NO: 92841

SEQ ID NO: 92850 - DNA, 1089 bp, Vibrio vulnificus
ttggaaaatttacttcaagctgaacaaacaaaaaaagatccaggagcctctacgtttgcaaagtactggtaccaatacaactgggcgctagtgaagtttttagaggaatgtgattctagagataattgctctctttcgattgaatgcaatgaagatgtgatgattattgatgattgtacatccaacaaaacaaaagtggatctttatcaagtaaaagaaaaatcatccagtaagaacatatcagcagctacactagcttatgggaattctactaagtcaattattagtaagttggtcgataatcttgatagagagttgttaagagagagaattaatcgtttggcgattgtttcttctgtacctattaaaatgactctaaaggacaacagagattcaactgtcctcaatagttttaagtggtctgatatttctgattctgattcaaaaatattaatgcagtccttacaaaaggacttgaaaaaagaagagattcctttgttcatagagttcataaagggtatcgagggagtaaatgagagcacgcactctagtatagcattaaaaaaactcgtagattatattgataaaattgaacctaatatggcttgtcagccaagagttatttttgaagttttgagaagtgagttggttagaataggcactgacgaaaacatatatacggtctgggatgattttataaaatcaaaagttataacttctaagaatctaaaagatattataatcaatagactcgttcctatcttaggtagcaattttgaaagtgtttggagtaatatcaagacgagtgaatatttcaatgacttaaattttatggataggattaaatttaaagactcatgtagtaaatattacaatttaaaaataacatcgactgattatatggtgtttaatgatgttgaagcagaggtttcacgtgtatgcgaacgtactgatatagaaacctattgtgactttgtgacaattttggtaaagaatttgaattcgaatggattgatattagattattttcgaaacatggatatttcgttgtattctattgctaatgttgaaatatcagagaagctataa

SEQ ID NO: 92851 - DNA, 1659 bp, Vibrio vulnificus
atgaagaaattaatattccaagaactaataatcgtatcagatttagaaaagtcagcagggatatttcagtttggaccgaaaaggaacttgattcttggagcgtcaaacaaagtaggtaaaacatcactatgcacaacgcttatgtggtctataggatgcaatgttgaatttccacccaattggaagaagttgggtattaaaacaatattaaagtttcaagttgatagtgctacttactatataaagagaagcgataagaaattatctataattttcccttctggatctgaaaaagaatatgacaaagtgacaggggattattctgctgatattggggatattcttttcagtccattgtacatgaagattaaaggggggtctccctcgcctggtgtaccctctgcacagtttttggcttcatttattcattcagattctggatggggagaactatttaagtcttttaaagacttaaatatgtattcgccttccgaaaagaagtatgttttggaatatttccttggtataagagatgtttcattttttacgaagagaaaagctagagttgatttggaaggaaatatagaggcatctaagcaaaaattaaataggataatgattgttgataatgacattaaaagtcttctcaataagggggaatccgaaaatgttaacgtgtttgatatagatccattattagaagaacgctcttttgttttagctaatatcattaagttgaagagtgaaaagtatgatgtaaacaaaagaatagggttgatcgagagagcggaacatgaattgtttgaggattaccagtttgcaacaaataatgttgaaggacgactaataacttgcccaacatgtggtgttattcacgaaaatgatatagttaatcgttttaatatcataaatgaaagagattcgttaaagaatcatcgaatgagtttgcttaaagatttgaatgaaatatctgaatatatatctcgagaacaaaggaaaatagatgagataaatgcgaaaatatctgtgaacgaaaggttttataatctgagtagacctacagagaaagatatatactcacacggaactgaaactgttattgagtctgttttttctgagttagtaatgctcgaaaataaatctatagcacgatttgaagaagagttagctagtatgcctaaatttagtactgctacatctaaatatcgtgataatgctagtaatatacgagaattattttctacgtctcttatagaatctctgcatgactttaacgttttagatgcaaatgaagaactcgtgagagaagatccttatgctaaaattcatgttagcggcagtgatatatcaagaacaacactcggatactacaaaactttaaatgactttaagctgaaaaattgtgattctgttattcttccctttgtgtgtgatagccccatgcaacaggagcaagacgataaaaatatcgatagtgtagtcgatttgatccaagcatggagcgaacaacagtttttcttatttgggaaagattacccttcgtatgaaaaattaaagagagacccagatacgaaacttatatatttagaaaataacaggcgaattttatcaaaagaagattatccatcattggctagttattggtcttcctcggagtaa

SEQ ID NO: 92852 - DNA, 1074 bp, Vibrio mimicus CAIM 602
atggcagacaatccactcgcagcagcccaacgagaattcgcaggagcaagcacctttggaaaatataactttcaattccattgggcgctgtgcgaagttattgaaaagcataaaaataacaaagagtatgctctgctaattgagtatcatgaagatatcgttattgcggatagtttagacgctaaactagctaagtttgagttttaccaagtcaagaatcagggcgcgacttttacatcagcagctttaacaaagagaaaaaaaggcacgaataaagaactaaagaattccgttcttggtaagttactgagctcttgcatcaatactgaatatgaagatcgtatcaccaagatcgggttagtttcatcaagtggatttaatttcaaggttaataaagatcttaagctggatgtgctcaaagtaggtgatattgctgagattgatctggctaagttgaccgaaaatataaacgccgagttaggtattgatgtattaccagagcacctacaattcatagttcctgagatacaactcaaaaatcaggaagactatgtattatctcaatttgctcggctcgtcgaatccttattccccggggctttgtgtaatccagtaaacatctatcgctctgttgttgatgaaatggggcgaataggccgcatagagtatgattacaaggattgggtaaggcttattgataaaaagtcactcacttctacggaagttcataaagtactttctctgcattcaagtcacccctgtgttgatgacttaaaaagtgatttcgacgacttagctaatgatttaggttggaaatcaaagaagaagcgtactttcaaaggaaaactagccttacttgcattacgccgagcgggctttatgagtgccttggacattgaaattacagacttattcaagcagtcccatatcaaaattgacgaagataactataacgatgactcgacgtatatagaagccttgcttcaacaagctaatgatgatggcttatgtgcgaaagtaagtaatcaagatgagttgttgctcgaagttgtctactgcttattaaaggtctga

SEQ ID NO: 92853 - DNA, 1737 bp, Vibrio mimicus CAIM 602
atgaaaggcttgcaatttcaacgtctagttctactgtccgattcgaaaaagttggcgaatcagttcatgtttccgaagaggctcaatctcgttacaggaaacgacaatagcattggtaaatcaacgttagtaaaaagcttattttgggctattgggtgtgacccaaagtttaatgaagactggaaactacttgacgttaaaacggtcctttacttcaaagtaaacgaaaaagagtatgttgttagtcgctatgtggatggcctctacttcggacaaaaaaattcgccattgcagaaatactccaaagtaacagggaattttgcaatggactttgcaagagaagttggctttgatttgttactggaaaacaaaattggtgagttagattgccctcctccagcgtattactttttacccttctacatcgatcaacagaaaagttgggatgaaccatggaacgggtttgaaagactacaacagtacggcaatttcagaacaaacctaattaagtatttctgtggatacttgtcgcgtaagcactttgaactcgaaagcgaaatattcgaacaaaaggctgcagatagagaggcaacccagcaagctgaacgtatttccgaggctttaagtgtccttgaagaagcagctccagaaatcacagtcgctgttacacagaaagagctagagtctatacaggttgagattgaagtagaacttaaagaattttcgaagcatcaaactaacctcttcgatcagcaatcagttctagtaaatgaaattcacgacttagaacagcaacatattttagcaagcacttcggcaagagagcttgaggaagattacattttcgctgtagaaaatgtgtcatcggattctttggaatgccctttatgcggtactgagcatgacaattcattgcttagccgtgcgggtttgctagcggataaagaagggcttgaacaacaagccaatagtataaaaaatgctctagtcgaaaagtacagacaaagagaagagctagtccaagagctagaatttgtcgcatctgaaatcgatcgaatcaatgagaaatacataaaagaggactcatctgaggaaaagtctgatacccaatgtgcatttgaacacgctttgtattccgtttcgcaaaaaaaggtaaacagcagtgttttgcagaagaaagagcattttcagtttcaatcccagaaggctaaagacaaccagaaagacatcaaaaaggaacagaggaaacttcttaagaagaaagagaaggatgacctcaatgatttgtttatcggtaatttagttgaaagtattacaactctagctgctactggggtgaatctaaatggtgttaagtctcctatggattatagaaagcttcttggtggtggagctgcagaaggaacacgaggtactctggcgtatcagttatcagtccttagacaaattgaatatgctggtaactgccaaattgctccctttgttttagacacaccgaatcaacaagagcaggctaaacatcgatatgaacaggtcatagatgttattactgaaaatattccgcgtggatatcaagtgattttgtgtgcaatggatgacaatgatgctttagctgcatacaagaaagaagcacacgttatcgaactcgatgataatcgattgttacaaggtgaactatatgaagatctgcgttctgaatacgaaaatgaggtcttgaacaacaccgctactgaataa

SEQ ID NO: 92854 - DNA, 1077 bp, Plesiomonas shigelloides 302-73
atggtaaatagtaattctggtgtagagggtggttctggctattcatttcagcgttgctgtgttgtttttctattatttgaagactatgaaaagttaaacatagaggattactttatttgcttagagcaccatgaagattttctattcgcatttttggacgaaaataggcatttaaaacaaattgatacctatcaagcaaaaaaatcaagagatgactggaaaacagatagtgacctttgtgaaataattggaaaaatgacgatggtgggaaaagagcttgtcaacgatcctcatgacaagtctaataattatcaacataccctaaattttctaaccaatagaaatatattattaacaagtaaacaagaaaaaggtactaaacaagataaagtcaaaatccaagtttcaaaccgtcgaaaaaaccattctgatttaacagagcaaattaagaaaaatatagaagcaagaatttgccagtcaatactcgagatcactcaattaaagaatgtttattttcaatatattgatttagcacaaagctacaagagctggcagagagagctaaaaggcttatccatggagcactttggtcaggaagtgaatgatcatgaagctgttatttcaacattaatgcgattattggaagaagcagagcaaacatataatgataacaataaagttctattatctgacctaagcaaaagagtaactaaagataaaataaatgaaactttcaatatgtttactgtaagtaaaaagtcttttgatttttggcgaaagtattcggaccagatttcaacccaattagaactaaaactccctatacggagaagagcgcaagaactgcttgaaaattgttttgatttttttaaggaccttcagcaagttgaatatcgtaagatttacaagtttgttgaaactagaacagatattgacgagaaccatatctgtgaaactgattgtattgtggatttatatcactgttatcaacgtgaattccagccaagattagaaaaccacatggtggcattcgctgtgattgcagcatatgtagagacaagagggatgtatgtctaa

SEQ ID NO: 92855 - DNA, 570 bp, Plesiomonas shigelloides 302-73
atgtctaaattaaacttaaaaagcttattggtttattctcctaatgatgagaaaggattttacacagagtttagtgaatcagtaaatattattcacggacgaaatacatctggcaaaagcacgcttatccagtcaattatatatgctatgggtataaatgactcaaaagataatttgaatgatattaatagcggtgatgttttttttagacttgactgtgttttagaaaaaactggggaaagttgtaatctggtatttatacgttctgatgatactctggtcttgcaaaaaggtaatgagccagctattagatttgatggcattaacagtaacaattcttttgagtatggaaggtataaagaacttctttcaaaattaattggcttcaatttagtcctacaaaaacaatctgaattagtaagtgctccgttagaagcagcactgttgccgtattatgtatctcaatctgtgggatgggtttatatacgtgagtctattggagattatagattctataaggattttaaatttgattacttggattactattgtggtattgaaagtggtcat

SEQ ID NO: 92856 - DNA, 1047 bp, Aggregatibacter actinomycetemcomitans HK1651
atgctaaataaactgaataaaataaagcaacgagaaacatcaggtagcgatacatttaaaaactatgactatcagtatcactgggctatctacactcttttagagaactcaagagaaaatgatgatatagctgttctagttgaatttcacgaagatgtcattcttgtagaaaatgtatcttcagaaaataatcaatttcatttctttcaaattaaagcaaatgataaaagtttaacattaagtgacatactcagaaaagaaaatgggaataagtctattttagataaattaacattaggaaaagaatacttagaaatattagataatataaaatctatcaaattagtatctgcaaacggattttcctctaaattttgtgctaatgaatccaacttttatgaactatgtgacaaagataagaaaaaaatagaagacaatctaatgcttgaaatagataaaaactcttttttaagtaaactttatttttctaaatcaaagctaccgaaaataggatttattcaaactgtaaaaggaatattatcagaaattattcaggaaattcaccccgataaaagaacaaatgtgaatgctatttatcttgttctaaaagatgacttacacgataaaggaaaaaagagactaactgataaagaagatccactgcaagaaaaaggaatgaccttttctactgtaaaagaagtaatcaaccgctatacagatatagaagatgacaatctgacatcggtattagatatgcttaataatacctcttacgctataatcgaaaaacaaaagataaagaaagagttattaaaatatagtacacatcatttaaactcaggaagtattcaagctcaaataaaattagatatattaaactctaacatacttgatgatttgatgtgtagtaacaataaacaacttactgaaataattaataatttctgttcaactttagaattaaagtatggtactataagtactgttcaaatgatcaagtcaggggtgttatatgagttatcgagatacattagagaaacagcgtaa

SEQ ID NO: 92857 - DNA, 1611 bp, Aggregatibacter actinomycetemcomitans HK1651
atgaaaagactaataattaagcaattagctattctttctaaagataaagatgcgggaaacctatttacttttagtgatggagtgaactttattctatctgataaaaactcagcaggaaaaactacactattgaacttaatgtatagtgcattaggctgtgtagtaaaatttaaaaatgaatggatcaattcatttattagattagatatagctattgaagggaactcttactctctgtataaaacaccaaatgaaatatattacatacacgatgaaaaagatttagtaaaatatgaaaatgaatcagattatcataaaagactatctgaaattttaggatataaaatatacctaaaagttcattcaggtactcctaaacttgctagacctgcccattttttcttaaccagctatatctctcaagctaaagggtggaattcctttttcccaaattcatttgaaaaactaggggaatttagagcgtttcagcctgatctagtagaacaattctgtaaagtaaaaagtgataaagaattagaaaacgaagaagaattcaatagagttaaagataatttaaaacaaaaaactaatgaaaaacaagttctgaatttaactaaagaaaatcttgagaaagaaactaatttcgacattaataaacttaaagaaaatgttgaaaattatgagaaaagcttaaatctattacaagatgaactatcaaatttagttgttgaacgacaatttttacttaatgaaataaattttgttactccaacagttaaagaggttgatgaagattaccaagaagctcgtatgcatggagctaaaatagaatgcccttattgcggtacaattcactctaatacaattacagaaaaatcagagttatttttcataaaaacaaaattagaagatgaattaatcaataatcaatctcgcataaaggaaattgacataaaaatatcagaaacagaaataaatataaaagaattatcagagcttaaatcaggcatagatcatcttattagcgataacacaaaacacttaagaaaagctataacagcaaatgaaatatttggaataataagtgatttagaaaatgaaataacacaattagaaaaacgcaaaaaatctataaataaaataaagaataggaatagaaaggaatatgaagaacacagagaagctgttaatgacttcttcgtcactaagttaaaatattatgctgatagattatctattgtgtttaataattatgacgaaatccaaaaggttactgattacaataaagttttaaatgcggttaaaggtggggctgccgatagtaatcggactgttttagcatactatttagctatttatgctactgcaataaattttaatactgatattcttccacctttagtactcgatactcctaatcagaatgagcaggataaagagaattataaatctataatagatacattaataaaagaaaacaacaaacagataataatctgtttaattaggagtgaatattcagaaaaattaaaacctgtaaataaaattgaggttaatagattaatgaaaatgggagagtatcataagttttttgatgaattagagatataa

SEQ ID NO: 92858 - DNA, 1047 bp, Aggregatibacter actinomycetemcomitans HK1651; identical to SEQ ID NO: 92856

SEQ ID NO: 92859 - DNA, 1611 bp, Aggregatibacter actinomycetemcomitans HK1651; identical to SEQ ID NO: 92857

SEQ ID NO: 92860 - DNA, 1089 bp, Bacteroides fragilis str. B1 (UDC16-1)
atgaataataaaaatacaaacccattgtttgcaccccaaaaagacaaagccggtggatggacattcgataagtatgattatcaatatcactgggcattgtatgaggtactttcaaggcataaagaacggaaagaatatgctgtctttatagaatatcacgaagatgtaataattgcagattcgttagatgtcgattgtgcaaaatttgattttaaccaagtcaaaacaactaatgtggcttacactccacaccaactgactattagaaaaaagaaaaagaaagtagcaggatcatctgttcttgggaagctagtctccagtatagcccgagaagatattggtagccaaatttcttatgcaaacttagtagctctaaatggatttaaccttgaattaaaagataagggtgtctgcctaaaaaagattcaattagacgatttatcagaaaatcactataaagtaattgaagaagcgataattaaagagttaaatatatcttctctccccaccaacattcaatttataataccaactctgaacgagcataattatgaagagcaggttatagggatgattagcaaacttgtaaacttgctttttcctacatctcaatgcaattcggaagaaatctacagaagtttaatagatgagttacataagaagggaaaggttacttacgacttttcaaaatggaatgatttcttaaaggaaaaggctttgacatctatcactgtgtcaaatacaattgctaatttcacatcaataaaagatgaaacgacagtagagatgggttttaataatatttgtaatgaattaggaattaaatccatatacaaagcaaagctgcatagggcattcaacagatatagacagctgcgaattagcaataatagcactaatcaaattgatataaagaaagaaataatcaatttaatacatagaaagatggatgcaataagtgatgatgagagctttgaaaatctattagaatttgtaatcagtaacattgggtctgacataaaaagccagttttctgatgatacagatattaaaggagctattatttgtgaatttgtaatgttagattaa

SEQ ID NO: 92861 - DNA, 1701 bp, Bacteroides fragilis str. B1 (UDC16-1)
atgcgaagcttaaaattcaaacaactgctactattgtcagatacaaacaaactggcaaatcgattcaacttcggagaaggaaggaatctgataacagcaaatgataacacagtaggaaaaacaacaatagtaaaattgctattatggggtttaggctgtgaacctgctcttgattcaaagtgggctagtcaagattgtaaggtaattataaaatttagcatagaagataatatttttttcgtcagaagatataaaaatctaatagctataaagagagaggaagacaaagtttggatgcaatttgataaaataactgggggatatgctatgaaatttgctgaattgctaagtttcaaagcattattacctaatagagctacaggtatgttagaaacacctcctccagcgtactatttcttaccattttatatagatcaaaaaaagagctggagtacagcttgggataattttgaatcactaggtcaatatgaaaactggaaacaaacaataataaaataccatgtagggttactatctcccaaacattttgaactttcttacaaaaagatggaaatacaaaatcgctccaaaaatgtaaaagagaatattgaaaaggtggatgttgcacttgaaatagtaagtaaatatgtgcctaatttaacaatcgcaacaatagaagaaaataaatttaaagaatttaccgatgaaataagaattgaattaaaagagctgcaaactcagcaagaaaaacttttagacaactttactcaaaaccaatctgagaagtcttatttagagcagcaaaaagctatctcagaaagaattattgatgaacttgaaaaagactatttatttgctgtagaaaatgtagataatactattgagtgccctctttgtggtacaattcatgaaaactctatagtatatagaagttcaatacttgtagacaaaaaacaagcaaaaaatcagttagaaaaaatagaaaaatgcttagataaggtcaataatacgataagtaatattaacaacaaactaactactgttagaaataaaatcacttctataaacgcaaagtatattacgattaatgatagccaagtatctcttaataatattattgaaaatatagcaggtaattcaattaaagatttagctatatccgataaagaagaaatgataataacaaaaatatcattagataaagatgcaagaaacttaacaaaagaaataaaaggactgataactaaagaagatgctgaaaaaataagcaactcatttgttgctattctgactaaatatgtagagatatttggagctgaatctataaatttcgctgaaataaaaagccctctcgattatagtaaaataataaaagaaggaggtgcagcagaaggaactagagctatcttagcttattatttggctatctttacaatggtgacaaagtttggtagtgaagtagtagctccattaattattgacaccccaagacagcaagaacagtctgatttcaattatgagaaaattgttagctttttgactacaaacgtttcatcagaagtacaaatattattatgtgcaatggataaccctatcttagaatcatttaaagaaaatgctaatattattatattagataatactaaattgttatctgcaaagatgtatgaggaagtcagaaaagaatttttatctttatga

SEQ ID NO: 92862 - DNA, 1179 bp, Oxalobacter formigenes OXCC13
atgacaaaactaatcaagttgcatgaaattgagcctagagaaaacaatgggcgagatacgattgcacgctttagagctcaatttcgcgcggcaagtattgcatgcctatctatccttaatggaaaagacactgatcgtgtgtactgtgattatcatgatgattttgtagttagaaaaaaatcggcagataattttacatatgatttctatcaagttaaaacaaaagcaaaaagaaactatcaatggtcagtttcggatattcttgctcttaatgagagaaaacaacaaaaaaataaaagaacattggaaggtgtacgtgatagctttgtaggtaggttaatcatacattcaataaattttgaggacacatgtaataaagtaacatttatgacaaatgtccaactaaaagatgcggttgaaaacatcataagtgaactagaaagtgattcatttgaaaataaacatcttaaattcatagttgataatttcaatgatgtatttgaaataaaaaatcctattactgttgatgtcattgagaaacatctcaaaaagttagtttttatgcctggggtttcgtatcttgatcctgactctactgggctgacagaagaggctagaagtgctatatatcattatagtgaaattgatcttactcagtcagaaattgaaaaaattattaaaaatttaattgatcttgttgaaaagaagtcatttgcaagaataaatgatatttctgaagtagaacttgataataaagcgggaataggaatagatgatttacttacaattttaagtatatcaaagaatgcttattactcattatctaatggtggtgatacgaaagccttaaaaaatgcttcgattttatataggaagttaaaagaatctggtgctgatgaagaaatgatcaatttttgcgcggaacaaaaagttaattgggatgtgtgggtcagggaaaaacgtaatattattgctgaatttgagtttaattttatgatggctagtctatctagaatttgtaaaaaatggcatcaaaactattataatctggatatcttgaaaaaagaaatcgaagagctacatattgatttgttagataaaaaaatagatgaatcaataacggtaagtttacttcttggaggatttttttcagtattggtgcgtggagaggctcgatga

SEQ ID NO: 92863 - DNA, 1764 bp, Oxalobacter formigenes OXCC13
atgaaactgttaagcttacgtgttaatccgcgtggtgaacatgggtggaaatcagagatattaaattttggcagtgatattacttttctatatgctccaaatggaagaggtaaaacgcctataattttgtctattgtattttgtttaggatatcctataaaattccgtgaagatatatcagaaaaatgtgaatctgtatcactagtctttgaaaataaagaaaaaatatattctttaacaagagtaattgatagaaatttctttgtgagtgtcattcaaaatgataatgaaattattgaatttgacactgagtctgaatactcgaaatttatattcaatattgccggtattgaatattcaaatcttatttctacatctaataaaaaaacacaaccttatttatcaacatttctaccattattctatcttgaccaagattatggatatcaggaatattataaaaccgcgcaagcaaatttcattaaggatcaattttcagaaatgtttcgtttggctctaggatttttgccaaaaaattcatttgatagtaaaaaaaatttactgaaactcaatgaaacattaaagatgcttgatgaaagtattgtaaatataagaggaatgattgaaaatattgaaattaatataaatgataataaaacagaaaagtatttagctgatgaaattgaaaaaagacgcgaagatttaagtaaattgagaacaactcgagatataaagggaagcgtattaaataatcttgaggaattattagtttcaaagtattctgatgttaagaatgtgcaaaaacaaatctatagctatcaatctagagttaatggtatagaaagaataaaaaatgaaattgaagtggaaattgatacattaaatttaaatgaagaatctcgtaaattgtttgcttcttttaaagatatatgtagtaatatagattgcaaattatttaccgtgagttcggaatcttatgcaaagaatttgttatatttaaaagaccaaataaaagatcttgagtcgaattctcactttattaatgaaaaaatcaaagaattatccaattttttaaataatattcaaagtaatatttctgagttagaagagcagattagaaatatcgaattaagggatgatattaaatcgttggtagatgtgattggaaggttgacagaagaaatctttgagttggagcgagaacgaaagtctattgaggtggtaaataaatataaaacatcttattttaataaaattgttgaaagagataaaatattagatttaataggttctatgtctgcaaatgttggtgtttctgatattgaatatactaaaataagattaaaatttaaagagtttattataaagtggttagatatattaggtactaaaaacatttctcgtgatataattgtagagaatgatctaaaaattatatttggaaaagaaaaaattaattctataaagggaagcacaaaagtaagagtaatattagctgttcgcgctgctttttttgagctatatctcaatgataaaaatagacaattccgttttttaatattggatacgcctaggcaacatgagattcatgaagaagatattaataattttatgattaatttaaaaaatttagcttcagataaagatgctcagataatattttcatctacttcttatcattataatattgataataatgatgagaaatgggagcctgcttttaatagagataatacatctatgtatttaggaaatttaaattaa

SEQ ID NO: 92864 - DNA, 1002 bp, Fusobacterium nucleatum subsp. nucleatum ATCC 25586
ttgcctaaagatttatcaggaagtataacaaaaaatcgttttagattggagttactttgggggattagtaaagtaatagatatacataaagaggggaaagattatacaattatttttgattttaaatgtgatatagaaatacatagagataatgaattattcttttatcaaattaaaacaaaaaagacaggttcttataatgaaaaggatttgtgcaataagaaaaataaagaaaaaaattctattttaggaaaattatatgcactctattcccctgaacatgatataaaattagcaattgtttgcaataagcagcttaaaattaaaagaaaagatatagatttttctgaacagtgttttgctaaattagatcaaggaataatagattatataaaaaaagaattatgtaaagagcttaatttaaaaacaataaacttaaataatgttttttatatttttgataatatggatttattaaatcctgaaaatgcaattagagggaaattaattaaatcttttgaagaaattgaaggtgaagaaccacaaaatcctaatgcattatataggttagtttatgatactgttaaagataaagcttcttatgaattagatttagataaatatgaaaatgttataaaagaaaaaggaattacaagagtagaatttgagaagattttgaatgcacataaaaaagattcaaaaaatggtataaacgaaactaaagaatatataaataaattaccccttaataaaagtcgaaaatataatatggcattaggaaatttatttgcaataaaaaaaacaaaacttttagaatcattaaaaataaaaatttataaatatatagaagaacatgaaaatgatttcgttaatatagataaaagtattttcctgttatccaaacaatttgatagagaatttagcaaagaatttactaatgaaatgaaaatagttcaatatatattgatttatcatatatatgcatctgggggagaattataa

SEQ ID NO: 92865 - DNA, 1683 bp, Fusobacterium nucleatum subsp. nucleatum ATCC 25586
atgagagttatatttaatgaaatttatatttttgatattaatttaaaaattgggtattcaactgattttaaaaagggtataaatatagtgacatcaagtgaagtagatggcacagatagaggaaagtctgttttattaaaaagtttatatcatgctttaggagcagatgctcactttgattctaaatggagtgaaaaagataaaatatatatattaaagtttcaagttgaagataaaaatttttcaatatataggtcacaaaaattatttaaaatatttgataaagatagtaaactgattttcacaacaattcatagagaagaattatcagaatttttaggaaaattatttaatttttcaatatttttacctaataaaaaaacagaacaattggtattggctcctcctgtatatagttatttattaaattttttggatcaggataaatattcaggaacaaattttgattcattcaaaaatcttgcccaatttagtaattttaaacttaatgttttatacacacatttaggggtttacgataaaaattattttgagttagttaagaaaaaagaagcattagaaaatgaaataaagaataaaaaagaagaaatagcaacttttaataaaatgagagaaaaaacaactttaatgctaggaggtttttcttgtccagaaacaaatgaagcattagaaaatgaattaaatattaagtctaaaaagtattcagatttattaaatgaaatgaatttaacaagaaatactcttattgatttaagaaatcaattaaaggaatatgaaataattctagaacagttatctaaatttaaaattattcaagaaaaagagattaatacaattttgaaaagtagaatatgccctgagtgtaatacaaaactagagaatacaatagagataagaagtaaaaaatataattatatagaagatgtattaaatttaaaagataatataaatattgaaaaaaatttattgaaagaaaaaattcaattaaatgaaaactcatattcaaaattggtcacattattagaaaaatatgatgaggaaattaaaaataataaaaaagaaattgacaattatataaaatttagaggattgaataatttggttgataagataaatgctgacattttatccgaagtgaaaaaagaaaatgaggctatggaattattaaaaccaataaaaaaacaattaaaaaatgcaaatgaaaaaactaagaaaattgaagatagttactataatatgatagataaattaaaaattaaatttaatttaaatgaactatcctccgaagattataaaaaactatctaaaaatttttgtgcaggtggaagtaataaaccactatcaacagttatatggtatttaactcttaatgtattaaaggaaaaatataactcaaatactataaaatttccaatgatttttgatagtcctaataatgcagaaactgatcaagaaaagaaagaagcaatagttcaatatattttagatgaatcaagtaattttgaacaattaattatttcaacaataggattttcaacagataagtataaagtaaaattcgatcttaatatcaaagttttaaaaaatgaaaaatatgggttactgaataaagaatcatataataaaaattatgaaatattaagatatatgaatgatgcataa

SEQ ID NO: 92866 - DNA, 1029 bp, Fusobacterium nucleatum subsp. nucleatum
atggatagaagtcaatattatatgaatttgcctaaagatttatcaggaagtataacaaaaaatcgttttagattggagttactttgggggattagtaaagtaatagatatacataaagaggggaaagattatacaattatttttgattttaaatgtgatatagaaatacatagagataatgaattattcttttatcaaattaaaacaaaaaagacaggttcttataatgaaaaggatttgtgcaataagaaaaataaagaaaaaaattctattttaggaaaattatatgcactctattcccctgaacatgatataaaattagcaattgtttgcaataagcagcttaaaattaaaagaaaagatatagatttttctgaacagtgttttgctaaattagatcaaggaataatagattatataaaaaaagaattatgtaaagagcttaatttaaaaacaataaacttaaataatgttttttatatttttgataatatggatttattaaatcctgaaaatgcaattagagggaaattaattaaatcttttgaagaaattgaaggtgaagaaccacaaaatcctaatgcattatataggttagtttatgatactgttaaagataaagcttcttatgaattagatttagataaatatgaaaatgttataaaagaaaaaggaattacaagagtagaatttgagaagattttgaatgcacataaaaaagattcaaaaaatggtataaacgaaactaaagaatatataaataaattaccccttaataaaagtcgaaaatataatatggcattaggaaatttatttgcaataaaaaaaacaaaacttttagaatcattaaaaataaaaatttataaatatatagaagaacatgaaaatgatttcgttaatatagataaaagtattttcctgttatccaaacaatttgatagagaatttagcaaagaatttactaatgaaatgaaaatagttcaatatatattgatttatcatatatatgcatctgggggagaattataa

SEQ ID NO: 92867 - DNA, 1683 bp, Fusobacterium nucleatum subsp. nucleatum; identical to SEQ ID NO: 92865

SEQ ID NO: 92868 - DNA, 1071 bp, Cellulophaga lytica DSM 7489
atgagtgataaaacaaatcaaaatccacttttagccgttcaacgagaaaaggcaggttctgaaacgtttgaaaaatattcataccaatatcattgggctttatatcgtgttttaaatgaccatattaaagccaatgagtatgcagtatttgtggaacttcacgaagatgtagtcgtaagcgactcgttagatgcttcaaaagctaaatttgaatttaatcaagttaaaactacaaaaggacgatttactgcaaataaattggttcatcaaaaaaagaacaaaaaatgtgtgttaggtaaactaataagcagtggatttgaaaaaccttttaaggatagaataacagaattaaacttggttgcacttaatgacttttcacttactctcaaagaagaaggtttaagtcttaacaaaataactttgaatgatttgtctgatgctcaatttaaagaattagaagatgaaatacgaaaagaaatggggatttcatcgttaccttctaatatacaatttatcgtaccagagctatcagaaaagaattttcaaaatgatgtaattgcttcaattgctaagttagtctctaatttatttccaaattctcattgtagtcctgttgagatataccgtttactaatagatgaaataaatcgaaaaggaaaagttacttatgatttcacaaaatggaatgatttactaataaataaagcacttacatctattacagttactgaggttattaattcatttacaagcatcaaagacgaagcaaaaattgaagttgaatttcacacaatatgctcggaaataggattaaattcaattaattctaaattattaaaacgaccatttgatagatacagagctaaaagaatcagcaatagtagcactcttcaattggacacaaccaatttctttgctaatgaaattcaattaaatttagataaagggattgatgatttaggaaaattaatcgacaacgtaaaaaaacaaatccctaaaaaaattgagaagcaatttaacaatgaactagaaataaagagtgccattatttgtgaatatatattgttgtaa

SEQ ID NO: 92869 - DNA, 1761 bp, Cellulophaga lytica DSM 7489
atgctaaacttaaaattcaaacgtctgctgattctatcaaattcaacaaaatcagcaaatcaattcgaattcagcgaaactttgaatctaatcacggcagttgacaatagtgtaggtaaatcaacattagttaaacttttattttggggtattggatgtgaaccaactttagatactaattggagcacaaccgatagtaaaactattgtggaatttagcgttgacactaatgattatactgtaaaacgatacaaaaatcagatttccttaaaaatcaaggatgaagattttgtcgattatgaaaaaattactggagaatactctcaaaaagtagcagaaattttggaattcaaggctcttctaccaaatcgtagtacgggattaatggaaacaccaccacctgctttttattttctaccattttacattgaccaaaaaagaagttggtcgaaagcttgggacaattttgaaaaattggaacagtataaaaattggcgaagcacaatagtaaagtaccacgtagggttgcttacaccgaaacattttgaactagaaagtaaaaaagctgaaaaaaaggacactaaaaacttagtacagtctcaaatagagagaattgaaacaacattggatgtggtggaagaatatattcctcatattacaaatgcaacaactgaaaccaaagaatttgaattattgacggaagaaattaaagttgacttaaaaaatctacaagaagaacaagaaaaaatacttagtcaattaacctcattaaatggagatagagtatacttagaacaacaacaaataatcacggaaaagataatttcagaactcgacaaagactacaaatttacaattgaaaacatagaagaagatgaaatagaatgtccattatgtggggttgttcacgaaaactcaataataaatagaacttcaataatgacagacaaaagtcaagcggagaatcaattacaatcgattttaactgaacttgacaagattaacaaaaaaattgataacgctaatttcaaattagataaggcacgagagagcattctaaaaataaatgagaaatatgtcattagcgaagaactacctgtatctaaacacattgaaaacacaaattcggtaaaacgtgatgatatagaaattaaagattttaatttcaatcaaattatagagaatattgcaggtaacgcaattaaaaaaagtgtgttaaatgataaaattgaaaaagttaattctgtagacacacttaaaaaggacataaggcaattaggtaaagaacaaaagggtttaattactcttgaagatattgaaaagattaacaattcattcagttcaattttttctgattatatagagttattagatgcagaagcagtcaacatttcatcaattgaatcgcctttagattataataaagtcataaaagaaggtggagctgctgagggttctagagccattctagcatattatttaagcattttcacaatggtggaagaatatggaaacgaagtgaaatcagcattagttattgacacacccaatcaacaagaacaatctgatacgaattatgagaagatagtaaatctgcttaccaatagaacatccaaaaaaacacaaatattattgtgcgcaatggaaaatgaacatttagtccaatttaagaaaaaggctaaaattataaccttaacaaaagatagattattgcttaaatcagagtacgaaaaagtaaagaaagtgttcgataataaataa

SEQ ID NO: 92870 - DNA, 1080 bp, Flavobacterium johnsoniae UW101
atggctgatgcaattaatcctttatttgaatctcaaagagaaaaagccggttcacaaactaaaggcaagtacaattatcaatatcattgggcactatacaaagtcttaagcgaacatcaattaagaaaagaatacgctgtgtttgttgaattacatgaagatgtagttatatgtgattctttgaatgctgagaaggctaaatttgagctaaatcaagttaaaactactagtaaaaacatgtctcataatgaattaacaaaactaaaaaaaggcgtaaaaggctcttctgttttagctaaacttgttgataatactaataaaaaaggttattctcctaaaataaacagccttaatttagtttccgtttatccttttactttagagttaaaacaaaaaggagtgattcttgagaaaattacattagaggatttgtcagattctcaagtaaaaaaacttgaggatgcaattgaaaaggagttaggggaaggagttgccttgccaaaaaatcttcagtttattgtttcaaacctttctgagaaaaattatcagaatgatgttattgctacaatctcttcattaatcgaaaagatgcatccagaatcttattgtaaacctaacgatatttatagattattaattgacgaaatagatcaaaagggagttgtagaatatgattttgttaaatggaatgatttattaaacaagaaagcattaacttctataacaatcaacaatgttattaatcaattcatcaacgttaaggacgaaggacaagtacaatctgattttcacgaaatatctaaagaattgggactaacagttattggacgaaaaaaattaaaaagtggttttgaaagatatcgtttgtctcgtttaggtaacaatagtgttctacaactcgaaacctctcaggaaattattaaattaattagacatgaggtaggtattggagaagaaaatattaatgaattaatagaaaacgtaattaaaaaacttaatgcaaaatatcaagatccattttcaacaattgaaaatttaaaaggagcaataatttgcgaatatatattagataatgaataa

SEQ ID NO: 92871 - DNA, 1701 bp, Flavobacterium johnsoniae UW101
atgtcacacttaagattcagacaactgctagtaatatcaaattcagcaaaatccgcaaatcagtttcaattcgagagactaaacttaataacggctgatgataatagtgtaggtaaatctacacttgcaaaattattgttttggggcttaggttgtgaaccagaattcgatacaacttgggcaacttttgattgcagtactataataatgttttcgattgaaaatcgtgaatatgaaattaaacgatataagaatagtatatcgcttaaagaacaaaatactatagtgcattttccgaaaattacaggggatttttctgtaaaactagctgaaatagttggttttaaagcactattgcccaaccaaaaaactggagaattagaaactccaccaccagcatattatttcttaccattttatattgatcaaaaaagaagttggtcaagagcgtgggataattttaataatttaggtcaatatagatcttggaaaaaaacaattattaaatatcatgttggactactaacttcagattatttcgagttggaaatagagaaggcaattaaaaaaaacaataaaataattttaaattcagaagtagacaaaattaattcaactcttgaaattgtggaaagttatcttcctccagcaactatagccacttttgttaaaaatgacttcgacgacataactgtagaaattgaaaaagacttagaagaactatctatacaacaggaaaacgtttttgacaaatattcaactttacaaattactaagtctcatttagaacaccaaaaattaattgcagaaaatttaattcaagaacttgataaagattatgtttttgcagtagaaaacataccagaaaaccatcttaagtgcccattatgcggaactaattatgaaaactcaatagaaaacaaaaccgcaatattaacagacaaaagtcaggccgaagaccaacttgataatatcaattatgatcttataatcacgaatagaaaattagcaaatacttcgaatgaattgaatcaaattagggaaaaaattgataaccttagcgataaatatttaaaaaaagaggataacgaacattttacattttctaacttaatagaaagtataggaggccactcaattaaaaagaatgttagcgaatcaagagatagcaaattaggatctattcaagatttagatagagatattaggctggcaacaaaaagccaaaaaaatctatacaaacaagattatattgacgatattaatggcgactttcattcttttcttagttctcatataaaatcattagatgcacaggcggttaatctttcacaagtaatatcccctttatcatatagcaaaattatttctgagggtggcgctgccgagaattcaagagcaatattagcatattatattgctattttttcattagtagaaaagtacaaaaatgaagtggtttcacctttagttattgatacaccaaatcaacaagaacagtctgaaaataattattcaaacattgtaagtttaatattaaataaaatctctaaaaataatcaagtaattatttgcgctatgacaaatcctcagcttgctcctttagcacaaatagctcatattattaaactagataattctaaacttttagatcctaaaaaatatatagatatcaaaaaaatctttgatagttgggaataa

SEQ ID NO: 92872 - DNA, 1026 bp, Finegoldia magna ATCC 29328
ttggaatattcgaactattatatgaatttaccattagatttagcaggtagtagaacgaaaaatagatttagagttgaattgttgtggggagttggtaaattaattgatgcatataagctgtacgatgactatacaattgtgtttgatttcaaatgtgatattgaattgcatcgtgataatggtcttgatttttaccaggtgaaaacaataaatagaggtaatcatagttctaaaacactaactaagagaaaaggaaatagtagatctattttgggaacattgtatgctctttacaacccaaatcataatataaagctggctgtagtttgtaataagcatttgaaaattgatagtaaagaagatttaaggaaagaagtttgtttaggtgagttggacaaaacagtaatagattttattgaagataaattgcaagaagaactaaagttatcagaagtcattcttgataatgttttttatgtatgtgaaagtatggacttaacaaatcctcattatgctttgcttggaaagttaattgaagctttccaagaaataaaaaatgaagaacctaataatcctaatgctttatttcgattagtatctgatacagctcagaaaaaagcttcttatgagatggcaatcactaattataatgatgtactagaattaaaaggaatttctaaaaatgagtttaataaaatgcttgaatctcataggaaaaaatctataacaggcattgagcaggttaaagattatattaaaactttattcccatcagaaagaagattatataatcaagctttaactaatttactggaaattgatcaaagccatgagttgaatgtattaaagatatcaatttttgagtatattgaagggaatatagataagataaaaaacgaaaatgacctttttaatattttaaataatgtatttgatagtgaattccctatagaatacacaaaatacatgaaaaaagtattttatttaatggtattttatttatacacagagggaggtgatatttaa

SEQ ID NO: 92873 - DNA, 1695 bp, Finegoldia magna ATCC 29328
atggatgttattttcaataaaatatatatttttgatattttaactaaagaggcttttgttacatgttttgaaaaaggtttaaatattgttacttctagtaacattgatggaacagatagagggaagtcagtcttgttacgtagtttatatcatactttgggtgctgatgcccacttcgataaaaaatggaaaaatgaagataaagtatatattttagagttttcggttaacgataatatatattttatatatcgccataaaaagttattcaaagtatttaatgatgtttttaagatattatttcaaacatcaactataattgagttatcatattttttaagcaatatttgggattttgaaatatttttaccgaatagaaggactgagaagctggagattgctccaccagcatatacatatgtaatgaattttattgaccaagattattatgatggaacatactttagttcctttaagagattaggacaatatcaaaattttaaacctgatgtaatatatgcacaatttggaatatatgataaaaattattttgaacatgttgaaagtaaacaaaatttattggaacgtataaatgattcagaagacgcatacagagaaactagtagaatgaaagaaaaagtatctaaactattaggtaatattgttgtgcctgaaaatttaaaagagcttgaaagggagctttctattagaacaaaggaatatgattatattctgaattctattaataaatttaggtatgagcttacaaatttacgaaatgaaaaatatgagcttgaaattgcattgaaccaaattgaaaggtttaagaataaaaaggaaaaagaaataaagtatattttaaatacagatatatgtcctgaatgccattcagttttgaaagatacaactgatcttagaagtaaaagatacaattcaattgaggattcgttatatataaaggacagcatatatgaggatatagaaaagatttcaaaatcaattttacaaatagagggtagttataaagagtttttagataagttggaatcatacaagaaaaacattggtatagctaagacagaaataaaaaattatagcagctatatggggctaaatgaactatataatagtttaaatttagagttatttaatgagtttaatttgcaaggagaacttaaagagaaactagaaaatattgaggaagacttgaaggaagtatctaaaattaaatcggatatcaataaaaaatattatgatatgattgatagggaagtcttaaagtttggattaaatgagttagaggaagcacaatataaagcaattaatcgagttttttgtgcaagtggaagtaataaaccaatttcaacagttatatggtattttatacttaatgatattaaaaaaatttttaataataaatgcttgaatttacctatggtattagatagccctaagaatgcggagatggattatgataaggcacaatccttaattgaatatatattagataattcatcaaattatacccaattgattttttcatcaattgggtttgaaagaaggaattttgaatttgaaagcgaaataaatattatagagctaaagaatgacaaatatcagttgcttgattctgaaactttctcaaaatataaatatgttttagaaaatgctttaagtgcccaattgattaaatag

SEQ ID NO: 92874 - DNA, 1029 bp, Streptococcus pneumoniae GA17545
atggataaagaaaagtactacatgaacttaccaaaagatttatctggaagcattgctaaaaaccgctttagattagaattattatggggaattagtaaaataatagatgaacataaagcaaacaatgaatatacgataatttttgattttaaatgtgatatcgaactgcataaagatgatgaattgaatttttaccaaatcaagacgaaaaaaagtggtaattataattcgaataacttatgtaagaaaggcaagaatgagaataattctattttagggaaattatatgctttatattcaccaaactacaatataaaattagcaattgtatgtaataaacaacttaaaatcaataataaggaaattgattttcctgagcaatgttttggagatttagatcaggatgtacttgatgatgttagggaaaagttgtgtacagaattaaatttaaacactgtgtgtttagataatgtattttatatatttgataacatggatttattaaatccagaggattctattagaggaaaattagtaaaatctttcgttgatattaaaggcgaagaacctcaaaatccgaatgcattatatagactggtcgttgattctgttaaagaaaaagcttcttatgaatttgattccggtacttatgaagatgttgtaaaaaataaaggtattacaagaagtgaatttgataaaatgttaaatgcacataaaaaggaatctaaaaatggaatcaatgaaacacaagaatatataaataacctgtcatttgctaagcgaagaagatataatacagcactgggtaatatacttgaaacgcagcaaagtgagtctttacgattaataaaaataaaaatttataattatattatggaacatgaagactcattagacgatattgaaagttatttaaaagaaatatcaaaattatttgatgacgattttgatgtggaatttaccgatgatatgaaatcagttcaatacataatgatttactatatgtatgcttcaggaggaattttataa

SEQ ID NO: 92875 - DNA, 1677 bp, Streptococcus pneumoniae GA17545
atgaatgttatatttgacaaaatatatatatttgatgttgtaaaaaaagaggcttattcaacagaatttaaaaaaggagttaatattattacatcgagtgatatagatggaacagatagaggaaaatcagttttattaagaagcttgtaccatgctttgggtgcggattctcactttgacttgaaatggggagaaaaagataaggtctatattttatttttcaaggtggatgataaagatttttcgatttatagatctcaaaaattatttaaaatatttaatgcaaaaggtgatattatttttactactattcatagaagtgaattagcagatttttttggcaatttatttaatttttctatatggttgccgcaaaaaaatacaaatcaattagtaatagcaccacctgcatatagttttttgctgaactttttagatcaagatgaatacatcggtacaaaatttaattcgtttaagagccttgctcagttcagtaattttaaacttaatgttatttactcacatttgggcatttacaataaagaatatttcgaacttgtgaaacaaaaagaagaattagaacttgaaattaaaagtaagaaagaagaaatagaagaactaattaaaatgaaagacagaaccaatttaattttggatggtttttcatgtccggaaacaagccgtgccttagaaaatgagcttaatatagaaactcaaaaatattcatcgctgattaatgaaatgaattcagtaaggaataagcttgttgatttgagaaatcaattagttgaacagaatatcactttatctcaaatatctaaatttgagataaaagaagaaaaggaaataaaaactattttaaaatcaaaagtttgtcctgaatgtcattctgttttagattcgactttggaactaaggagtaagaggtataatcatattgataatgctcttagtctgaaagatacaataaaaacagaaaatgcccatattgaagatgaaatactcaaaaatgagggaatatattcaaacttggctttggaggagcataataaaaagatttgtaaaaacaaaaaggaaatcaaagactatatcaagttcagaggactaaataaactaatcgatgagattaataatgatttgactattaatagcagaattatcgacagcacaaaggaggctctaaaaccactaaagaaagaatttaaaggtgttaaagataaaatgaaatctgttgatgaaaattactattatttgattgataaattaaaaataagattcaatttaaatgagttggaagctgacagttacgaacaactatctaaaaatttttgtgcaagtggaagcaacaaaccattatcaactgttatatggtatctaacactcaatgatttaaaacagaaatttaatcctgaaggaacaacatttccaatggtttttgatagccctaataatgcggagacagaccaagagaagaaacaggcattagtcgagtatattatggaatcatcagatcaatttagccagttaattgtttcggcaataggattttcagaaaaagattatagcattaattcgaatataaatataaaagttttagaaaatgaaaaatatagcttactaaatagtgagatgtatgttcagaattatgagcttttgcaatgtatgaacgatgcttaa

SEQ ID NO: 92876 - DNA, 1029 bp, Streptococcus pneumoniae
atggataaagaaaagtactacatgaacttaccaaaagatttatctggaagcattgctaaaaatcgctttagattagaattattatggggaattagtaagataatcgatgaacataaagcgaacaatgaatatacgataatttttgattttaaatgtgatatagaattgcataaagaggatgaattggatttttatcaaataaagacgaaaaaaagtggtaattacaattcgaataatttgtgtaagaaaggtaagaatgagaataattctattttagggaaactatatgctttatattcaccgaactacaatataaaattagcaattgtgtgtaataaacaacttaaaatcaataataaagaaattgattttcctgagcaatgttttggagatttagaccaggatgtacttgatggtgttaggaagaagttgtgcacagaattaaaattagacactgtgtgtttagacaatgtgttttatatatttgataacatggatttgttaaatccagaggattctattagagggaaattagtaaaatcttttgttgatattaaaggtgaagaacctcaaaatccgaatgcattgtacagactggttgttgattctgtcagagaaaaagcttcttatgaatttgattccggcacttatgaagatgttgtaaaaaacaaaggtattacaagaagtgaatttgataaaatgttaaatgcacataaaaaggaatctaaaaatggaatcaatgaaacacaagaatatataaataacctgtcatttgctaaacgaagaagatataatacagcacttggtaatatacttgaaacgcagcaaagtgagtctttacgattaataaaaataaaaatttataattatattgtggaacatgaagattcgttaaacgatattgaaagttatttaaaagaaatatcaaaattatttgatgacgattttgatgtggaatttactgatgatatgaaatcagttcaatacataatgatttattatatgtatgcttcaggaggaattttataa

SEQ ID NO: 92877 - DNA, 1683 bp, Streptococcus pneumoniae
atgaatgttatatttaacaaaatatatatatttgatgttgtaaaaaaagaggcttattcaacagaatttaaaaagggagttaatattattacatcgagtgatatagatggaacagatagagggaaatcagttttattaagaagtttataccatgccttgggtgcggattcgcactttgactcgaagtggggagaaaaggataaggtctatgttttatcttttaaggtggatgataaagatttttcgatttatagatctcaaaaattatttaaaatatttaatgcaaaaggtgatcttatttttactactattcatagaagtgaattagcagatttttttggaaatttatttaatttttctatatggttgccgcaaaaaaatacaaaccaattagtaatagcaccacctgcatatagttttttgctgaattttttagatcaagatgaatacatcggtacaaaatttaattcgtttaagagccttgctcagtttagtaattttaaacttaatgttatttactcacatttgggcatttacaataaagaatatttcgaacttgtgaaacacaaagaagaattagatcttgaaattaaaagcaagaaagaagaaatagaagaactaattaaaatgaaagacagaaccaatttaattttggatggtttttcgtgtccggaaacaagcagtgccttagaaaatgagcttaatatagaaacccaaaaatattcatcgctgattaatgagatgaatttagtaaggaataagcttgttgacttgagaaatcaattagttgaacagaatatcactttatctcaaatatctaaattcgaaataaaagaagaaaaggaaataaaaactattttaaaatcaaaagtttgtcctgaatgtcattctgttttagattcaactttggaactaaggagtaagagatataatcatattgataatgctcttagtctgaaagatgcaataaaaacacaaaatgcccatattgaagatgaaatactcaaaaatgagggaatatattcaaacttaactttggctttggaggagcataataaaaagatttgtaaaaacaaaaaggaaatcaaagactatatcaagttcagaggactaaataaactaatcgatgagattaataatgatttgactattaatagcagaattgtcgacagcacaaaggaggctctaaaaccactaaagaaagaatttaaaagtgttaaagataaaatgaaatctgttgatgaaaattactattatttgattgataaattaaaaataagattcaatttaaatgagttggaagctgacagttatgaacaactatctaaaaatttttgtgcaagtggaagcaataaaccattatcgaccgttatatggtatctaacactcaatgatttaaaacagaaatttaatcctgaaggaacaacatttccaatggtttttgatagccctaataatgcggagacagaccaagagaagaaacaggcattagtcgagtatattatggaatcatcaaatcaatttagtcagttaattgtttcagcaataggattttccaaaaaagattatagtatcaattcgaatataaatataaaagttttagaaaatgaaaaatatagcttactaaatagtgagatgtatgttcagaattatgagcttttgcaatgtatgaacgatgcttaa

SEQ ID NO: 92878 - DNA, 1029 bp, Streptococcus pneumoniae; identical to SEQ ID NO: 92876

SEQ ID NO: 92879 - DNA, 1683 bp, Streptococcus pneumoniae; identical to SEQ ID NO: 92877

SEQ ID NO: 92880 - DNA, 1029 bp, Streptococcus pneumoniae; identical to SEQ ID NO: 92876

SEQ ID NO: 92881 - DNA, 1683 bp, Streptococcus pneumoniae; identical to SEQ ID NO: 92877

SEQ ID NO: 92882 - DNA, 1029 bp, Streptococcus anginosus subsp. whileyi CCUG 39159
atggataaagaaaagtactacatgaacttaccaaaagatttgtctggaagtattgctaaaaatcgctttagattagaattattatggggaattagtaaaataatagatgaacataaagcaaacaatgaatatacgataatttttgattttaaatgtgatatcgaactgcataaagatgatgaattgaatttttaccaaatcaagatgaaaaaaagtggtaattataattcgaataacttatgtaagaaaggcaagaatgagaataattctattttagggaaattatatgctttatattcaccaaactacaatataaaattagcaattgtatgtaataaacaacttaaaatcaataataaggaaattgattttcctgagcaatgttttggagatttagatcaggatgtacttgatgatgttagggaaaagttgtgtacagaattaaatttaaacactgtgtgtttagataatgtattttatatatttgataacatggatttattaaatccagaggattctattagaggaaaattagtaaaatctttcgttgatattaaaggcgaagaacctcaaaatccgaatgcattatatagactggtcgttgattctgttaaagaaaaagcttcttatgaatttgattccggtacttatgaagatgttgtaaaaaataaaggtattacaagaagtgaatttgataaaatgttaaatgcacataaaaaggaatctaaaaatggaatcaatgaaacacaggagtatataaataacctgtcatttgctaagcgaagaagatataatacagcactgggtaatatacttgaaacgcagcaaagtgagtctttacgattaataaaaataaaaatttataattatattatggaacatgaagactcattagacgatattgaaagttatttaaaagaaatatcaaaattatttgatgacgattttgatgtggaatttaccgatgatatgaaatcagttcaatacataatgatttactatatgtatgcttcaggaggaattttataa

SEQ ID NO: 92883 - DNA, 1683 bp, Streptococcus anginosus subsp. whileyi CCUG 39159
atgaatgttatatttgacaaaatatatatatttgatgttgtaaaaaaagaggcttattcaacagaatttaaaaaaggagttaatattattacatcgagtgatatagatggaacagatagaggaaaatcagttttattaagaagcttgtaccatgctttgggtgcggattctcactttgactcgaaatggggagaaaaagataaggtctatattttatttttcaaggtggatgataaagatttttcgatttatagatctcaaaaattatttaaaatatttaatgcaaaaggtgatattatttttactactattcatagaagtgaattagcagatttttttggcaatttatttaatttttctatatggttgccgcaaaaaaatacaaatcaattagtaatagcaccacctgcatatagttttttgctgaactttttagatcaagatgaatacatcggtacaaaatttaattcgtttaaaagccttgctcagttcagtaattttaaacttaatgttatttactcacatttgggcatttacaataaagaatatttcgaacttgtgaaacaaaaagaagaattagaacttgaaattaaaagtaagaaagaagaaatagaagaactaattaaaatgaaagacagaaccaatttaattttggatggtttttcgtgtccggaaacaagcagtgccttagaaaatgagcttaatatagaaacccaaaaatattcatcgctgattaatgagatgaatttagtaaggaataagcttgttgacttgagaaatcaattagttgaacagaatatcactttatctcaaatatctaaattcgaaataaaagaagaaaaggaaataaaaactattttaaaatcaaaagtttgtcctgaatgtcattctgttttagattcaactttggaactaaggagtaagagatataatcatattgataatgctcttagtctgaaagatgcaataaaaacacaaaatgcccatattgaagatgaaatactcaaaaatgagggaatatattcaaacttaactttggctttggaggagcataataaaaagatttgtaaaaacaaaaaggaaatcaaagactatatcaagttcagaggactaaataaactaatcgatgagattaataatgatttgactattaatagcagaattatcgacagcacaaaggaggctctaaaaccactaaagaaagaatttaaaggtgttaaagataaaatgaaatctgttgatgaaaattactattatttgattgataaattaaaaataagattcaatttaaatgagttggaagctgacagttacgaacaactatctaaaaatttttgtgcaagtggaagcaacaaaccattatcaactgttatatggtatctaacactcaatgatttaaaacagaaatttaatcctgaaggaacaacatttccaatggtttttgatagccctaataatgcggagacagaccaagagaagaaacaggcattagtcgagtatattatggaatcatctgatcaatttagccagttaattgtttcggcaataggattttccaaaaaagattatagtatcaattcgaatataaatataaaagttttagaaaatgaaaaatatagcttactaaatagtgagatgtatgttcagaattatgagcttttgcaatgtatgaacgatgcttaa

SEQ ID NO: 92884 - DNA, 948 bp, Enterococcus faecalis JH1
atggtatttgactatgcatgtgatatcgaagtacacaaagatactggctttgatttttatcaagttaaatctaaaaaagacggagcagtttatactcaaggagcattactaaaaaagaaaaaacttgaagaagaagaaaagagtttttctattctaggtaggctttatgcccttgcaaataatcaaaataagaatattcatgtaaatttagtttctaataaaccatttcaagactctagtaaaaaaaatcatacaacaattgaaaacttggatttcaataatctagatgaggaagtgcaaaaaacaatagaatctaaacttcaagaggagctaggttcggacgttacacctgatatgtcaaaaattagttttatttatacttcgattgaccttttcagtcctgatgatacattgagaggaaagactagcaaatttttctttgaattaacaggaagtgagccaaacaaaccgaatgctctctataatttacttgttgaaacgatttctgaaaaagcttgttatgaattgcaattaaattgctattcagacatattaaatagaaaaggtgtttcaaaagatgatattgaaaaaataatttcactttattctgaaaaaactgatagagcagtagaaaaggcttcaatatttatagacaccaacataaacaaaccaataaaaagattgaaaatgaaaacgatgcttggtaaagtggtttccgatattgagagtggcaatagattagttttacagaatgaagagcttattgttcaatctatcttttcaaacttggagaaatatgatgttgaagagactgttttcattgatttgttagtttctgagtattcaaaacttttcactattgagtattcagaagactacagatatgccttttttttactaatcttaatgaaagtcgaggaaaatatttatgaatactctgacatttaa

SEQ ID NO: 92885 - DNA, 1686 bp, Enterococcus faecalis JH1
ctgacatttaataaattatatattttttcaacatttgaaaataaagcgaagtatattgaatttactaatggaaaaaacatcattactacagaagatgatgttattggaaataagaaaggtaagtctacaattcttaaaaatttatattatactatgggagcagactgctattttgaagataagtgggatgtccaaaagaagatatccgttttagaattttcagttaacaagacatcatatattatctttaggcaggataagctgtttaaaatttttgatttaaagaaaaatctattatttaagactctcaagagaaaagaattatcaactttcttagaaaaaatatttaagtttactgtaaaattacctaatcgtcacacagacaaattagagattgcaccgccagcttatttttatctcttaaattatacagatcaggataaaatgaatggaagttcatttgattcattcagaaatcttggtgaatattctaatttcaaattaaatacactttactcccattttggtattttagatgatagatactatgaagttatgaagctagttgaacagttaagtgagcaaattaaagctcttgatgatgaatgccagctattttataagatgcttgaaaaaattgaaaacgaacttgttgataaagttagctttcctaccaattttgatgttttacaacaagaagttgatagcacgaaaaaccaatatgaaaaaattgtacattcattgcagcttactaaaaatagattaattaatcaacgaaatgataattatgaggttaagcaagaactagccaatttaaggaagataattagaaaaaatgataaagacaaaaagacgataaacagtcatacttgtcccaagtgtcactccattattactgataatcttgaattgaaaatcaatactttaaacaatgaagaggactttttgttcttagctaacgaacttgaaaaagaatctttgaaagtagaggctaatatctataaagaagaaaaaaaatatcagcaattattagatactctaaaaaaatatgaagataaattagcattaagttcaaaagaaattagtaatgttttgaagcataaaggattaatggaagtcagagataagctgattatggatattgggaacagtcaggtcaatttgaaacaggctcaggaatcgttaaaagaacagagaaaaattttgaaagaatatttagaattgaaaaagcaaataaatgaaacttattatgaattaatgttgaatgataaaattcattttaacttagaagaactggactctgataaatttaaaaaaattgattctaatataagcgcaggcggaagtaataaaccaataaatactattgtctggtattttaatcttttgaaagtgaaaaataaatttaatccggatgctatacgtttaccaattgttttagatagccctgcaaatgcagaacttgatagagatagtaaacataccttgttaaagtatatatttgaagaatcagataaagatagtcaattaatagtttctactataggattttcaacttctgactttaaagaagaacattttgataatgttatcgaactttcaaattctaaatatgagttattgaatacagaagattatgagctttataaagaactgtgtaaggatttagttttaataaacgaatag

SEQ ID NO: 92886 - DNA, 1083 bp, Enterococcus faecalis PC1.1
ttgtcaaatgaagctatatatatgaaattgccctttgatttgtcaggctctcgaagtaaaaatagatttagatacgagatactatggggtctcagtaaattatttgatatatataatgaaaatgagtcatttgttatggtatttgactatgcatgtgatatcgaagtacacaaagatactggctttgatttttatcaagttaaatctaaaaaagacggagcagtttatactcaaggagcattactaaaaaagaaaaaacttgaagaagaagaaaagagtttttctattctaggtaggctttatgcccttgcaaataatcaaaataagaatattcatgtaaatttagtttctaataaaccatttcaagactctagtaaaaaaaatcatacaacaattgaaaacttggatttcaataatctagatgaggaagtgcaaaaaacaatagaatctaaacttcaagaggagctaggttcggacgttacacctgatatgtcaaaaattagttttatttatacttcgattgaccttttcagtcctgatgatacattgagaggaaagactagcaaatttttctttgaattaacaggaagtgagccaaacaaaccgaatgctctctataatttacttgttgaaacgatttctgaaaaagcttgttatgaattgcaattaaattgctattcagacatattaaatagaaaaggtgtttcaaaagatgatattgaaaaaataatttcactttattctgaaaaaactgatagagcagtagaaaaggcttcaatatttatagacaccaacataaacaaaccaataaaaagattgaaaatgaaaacgatgcttggtaaagtggtttccgatattgagagtggcaatagattagttttacagaatgaagagcttattgttcaatctatcttttcaaacttggagaaatatgatgttgaagagactgttttcattgatttgttagtttctgagtattcaaaacttttcactattgagtattcagaagactacagatatgccttttttttactaatcttaatgaaagtcgaggaaaatatttatgaatactctgacatttaa

SEQ ID NO: 92887 - DNA, 1695 bp, Enterococcus faecalis PC1.1
atgaatactctgacatttaataaattatatattttttcaacatttgaaaataaagcgaagtatattgaatttactaatggaaaaaacatcattactacagaagatgatgttattggaaataagaaaggtaagtctacaattcttaaaaatttatattatactatgggagcagactgctattttgaagataagtgggatgtccaaaagaagatatccgttttagaattttcagttaacaagacatcatatattatctttaggcaggataagctgtttaaaatttttgatttaaagaaaaatctattatttaagactctcaagagaaaagaattatcaactttcttagaaaaaatatttaagtttactgtaaaattacctaatcgtcacacagacaaattagagattgcaccgccagcttatttttatctcttaaattatacagatcaggataaaatgaatggaagttcatttgattcattcagaaatcttggtgaatattctaatttcaaattaaatacactttactcccattttggtattttagatgatagatactatgaagttatgaagctagttgaacagttaagtgagcaaattaaagctcttgatgatgaatgccagctattttataagatgcttgaaaaaattgaaaacgaacttgttgataaagttagctttcctaccaattttgatgttttacaacaagaagttgatagcacgaaaaaccaatatgaaaaaattgtacattcattgcagcttactaaaaatagattaattaatcaacgaaatgataattatgaggttaagcaagaactagccaatttaaggaagataattagaaaaaatgataaagacaaaaagacgataaacagtcatacttgtcccaagtgtcactccattattactgataatcttgaattgaaaatcaatactttaaacaatgaagaggactttttgttcttagctaacgaacttgaaaaagaatctttgaaagtagaggctaatatctataaagaagaaaaaaaatatcagcaattattagatactctaaaaaaatatgaagataaattagcattaagttcaaaagaaattagtaatgttttgaagcataaaggattaatggaagtcagagataagctgattatggatattgggaacagtcaggtcaatttgaaacaggctcaggaatcgttaaaagaacagagaaaaattttgaaagaatatttagaattgaaaaagcaaataaatgaaacttattatgaattaatgttgaatgataaaattcattttaacttagaagaactggactctgataaatttaaaaaaattgattctaatataagcgcaggcggaagtaataaaccaataaatactattgtctggtattttaatcttttgaaagtgaaaaataaatttaatccggatgctatacgtttaccaattgttttagatagccctgcaaatgcagaacttgatagagatagtaaacataccttgttaaagtatatatttgaagaatcagataaagatagtcaattaatagtttctactataggattttcaacttctgactttaaagaagaacattttgataatgttatcgaactttcaaattctaaatatgagttattgaatacagaagattatgagctttataaagaactgtgtaaggatttagttttaataaacgaatag

SEQ ID NO: 92888 - DNA, 1083 bp, Enterococcus faecalis EnGen0355
ttgtcaaatgaagctatatatatgaaattgccctttgatttgtcaggctctcgaagtaaaaatagatttagatacgagatactatggggtctcagtaaattatttgatatatataatgaaaatgagtcatttgttatggtatttgactatgcatgtgatatcgaagtacacaaagatactggctttgatttttatcaagttaaatctaaaaaagacggagcagtttatactcaaggagcattactaaaaaagaaaaaacttgaagaagaagaaaagagtttttctattctaggtaggctttatgcccttgcaaataatcaaaataagaatattcatgtaaatttagtttctaataaaccatttcaagactctagtaaaaaaaatcatacaacaattgaaaacttggatttcaataatctagatgaggaagtgcaaaaaacgatagaatctaaacttcaagaggagctaggttcggacgttacacctgatatgtcaaaaattagtttcatttatacttcgattgaccttttcagtcctgatgatacattgagaggaaagactagcaaatttttctttgaattaacaggaagtgagccaaacaaaccgaatgctctctataatttacttgttgaaacgatttctgaaaaagcttgttatgaattgcaattaaattgctattcagacatattaaatagaaaaggtgtttcaaaagatgatattgaaaaaataatttcactttattctgaaaaaactgatagagcagtagaaaaggcttcaatatttatagacaccaacataaacaaaccaataaaaagattgaaaatgaaaacgatgcttggtaaagtggtttccgatattgagagtggcaatagattagttttacagaatgaagagcttattgttcaatctatcttttcaaacttggagaaatatgatgttgaagagactgttttcattgatttgttagtttctgagtattcaaaacttttcactattgagtattcagaagactacagatatgccttttttttactaatcttaatgaaagtcgaggaaaatatttatgaatactctgacatttaa

SEQ ID NO: 92889 - DNA, 1695 bp, Enterococcus faecalis EnGen0355
atgaatactctgacatttaataaattatatattttttcaacatttgaaaataaagcgaagtatattgaattttctaatggaaaaaacatcattactacagaagatgatgttattggaaataagaaaggtaagtctacaattcttaaaaatttatattatactatgggagcagactgctattttgaagataagtgggatgtccaaaaaaagatatccgttttagaattttcagttaacaagacatcatatattatctttaggcaggataagctgtttaaaatttttgatttaaagaaaaatctattatttaagactctcaagagaaaagaattatcaactttcttagaaaaaatatttaagtttactgtaaaattacctaatcgtcacacagacaaattagagattgcaccgccagcttatttttatctcttaaattatacagatcaggataaaatgaatggaagttcatttgattcattcagaaatcttggtgaatattctaatttcaaattaaatacactttactcccattttggtattttagatgatagatactatgaagttatgaagctagttgaacagttaagtgagcaaattaaagctcttgatgatgaatgccagctattttataagatgcttgaaaaaattgaaaacgaacttgttgataaagttagctttcctaccaattttgatgttttacaacaagaagttgatagcacgaaaaaccaatatgaaaaaattgttcattcattgcagcttactaaaaatagattaattaatcaacgaaatgataattatgaggttaagcaagaactagccaatttaaggaagataattagaaaaaatgataaagacaaaaagacgataaacagtcatacttgtcccaagtgtcactccattattactgataatcttgaattgaaaatcaatactttaaacaatgaagaggactttttgttcttagctaacgaacttgaaaaagaatctttgaaagtagaggctaatatctataaagaagaaaaaaaatatcagcaattattagatactctaaaaagatatgaagataaattagcattaagttcaaaagaaattagtaatgttttgaagcataaaggattaatggaagtcagagataagctgattatggatattgggaacagtcaggtcaatttgaaacaggctcaggaatcgttaaaagaacagagaaaaattttgaaagaatatttagaattgaaaaagcaaataaatgaaacttattatgaattaatgttgaatgataaaattcattttaacttagaagaactggactctgataaatttaaaaaaattgattctaatataagcgcaggcggaagtaataaaccaataaatactattgtctggtattttaatcttttgaaagtgaaaaataaatttaatccggatgctatacgtttaccaattgttttagatagccctgcaaatgcagaacttgatagagatagtaaacataccttgttaaagtatatatttgaagaatcagataaagatagtcaattaatagtttctactataggattttcaacttctgactttaaagaagaacattttgataatgttatcgaactttcaaattctaaatatgagttattgaatacagaagattatgagctttataaagaactgtgtaaggatttagttttaataaacgaatag

SEQ ID NO: 92890 - DNA, 1083 bp, Enterococcus faecalis EnGen0286; identical to SEQ ID NO: 92886

SEQ ID NO: 92891 - DNA, 1695 bp, Enterococcus faecalis EnGen0286; identical to SEQ ID NO: 92887

SEQ ID NO: 92892 - DNA, 1083 bp, Enterococcus faecalis EnGen0413
ttgtcaaatgaagctatatatatgaaattgccctttgatttgtcaggctctcgaagtaaaaatagatttagatacgagatactatggggtctcagtaaattatttgatatatataatgaaaatgagtcatttgttatggtatttgactatgcatgtgatatcgaagtacacaaagatactggctttgatttttatcaagttaaatctaaaaaagacggagcagtttatactcaaggagcattactaaaaaagaaaaaacttgaagaagaagaaaagagtttttctattctaggtaggctttatgcccttgcaaataatcaaaataagaatattcatgtaaatttagtttctaataaaccatttcaagactctagtaaaaaaaatcatacaacaattgaaaacttggatttcaataatctagatgaggaagtgcaaaaaacgatagaatctaaacttcaagaggagctaggttcggacgttacacctgatatgtcaaaaattagttttatttatacttcgattgaccttttcagtcctgatgatacattgagaggaaagactagcaaatttttctttgaattaacaggaagtgagccaaacaaaccgaatgctctctataatttacttgttgaaacgatttctgaaaaagcttgttatgaattgcaattaaattgctattcagacatattaaatagaaaaggtgtttcaaaagatgatattgaaaaaataatttcactttattctgaaaaaactgatagagcagtagaaaaggcttcaatatttatagacaccaacataaacaaaccaataaaaagattgaaaatgaaaacgatgcttggtaaagtggtttccgatattgagagtggcaatagattagttttacagaatgaagagcttattgttcaatctatcttttcaaacttggagaaatatgatgttgaagagactgttttcattgatttgttagtttctgagtattcaaaacttttcactattgagtattcagaagactacagatatgccttttttttactaatcttaatgaaagtcgaggaaaatatttatgaatactctgacatttaa

SEQ ID NO: 92893 - DNA, 1695 bp, Enterococcus faecalis EnGen0413
atgaatactctgacatttaataaattatatattttttcaacatttgaaaataaagcgaagtatattgaattttctaatggaaaaaacatcattactacagaagatgatgttattggaaataagaaaggtaagtctacaattcttaaaaatttatattatactatgggagcagactgctattttgaagataagtgggatgtccaaaaaaagatatccgttttagaattttcagttaacaagacatcatatattatctttaggcaggataagctgtttaaaatttttgatttaaagaaaaatctattatttaagactctcaagagaaaagaattatcaactttcttagaaaaaatatttaagtttactgtaaaattacctaatcgtcacacagacaaattagagattgcaccgccagcttatttttatctcttaaattatacagatcaggataaaatgaatggaagttcatttgattcattcagaaatcttggtgaatattctaatttcaaattaaatacactttactcccattttggtattttagatgatagatactatgaagttatgaagctagttgaacagttaagtgagcaaattaaagctcttgatgatgaatgccagctattttataagatgcttgaaaaaattgaaaacgaacttgttgataaagttagctttcctaccaattttgatgttttacaacaagaagttgatagcacgaaaaaccaatatgaaaaaattgttcattcattgcagcttactaaaaatagattaattaatcaacgaaatgataattatgaggttaagcaagaactagccaatttaaggaagataattagaaaaaatgataaagacaaaaagacgataaacagtcatacttgtcccaagtgtcactccattattactgataatcttgaattgaaaatcaatactttaaacaatgaagaggactttttgttcttagctaacgaacttgaaaaagaatctttgaaagtagaggctaatatctataaagaagaaaaaaaatatcagcaattattagatactctaaaaaaatatgaagataaattagcattaagttcaaaagaaattagtaatgttttgaagcataaaggattaatggaagtcagagataagctgattatggatattgggaacagtcaggtcaatttgaaacaggctcaggaatcgttaaaagaacagagaaaaattttgaaagaatatttagaattgaaaaagcaaataaatgaaatttattatgaattaatgttgaatgataaaattcattttaacttagaagaactggactctgataaatttaaaaaaattgattctaatataagcgcaggcggaagtaataaaccaataaatactattgtctggtattttaatcttttgaaagtgaaaaataaatttaatccggatgctatacgtttaccaattgttttagatagccctgcaaatgcagaacttgatagagatagtaaacataccttgttaaagtatatatttgaagaatcagataaagatagtcaattaatagtttctactataggattttcaacttctgactttaaagaagaacattttgataatgttatcgaactttcaaattctaaatatgagttattgaatacagaagattatgagctttataaagaactgtgtaaggatttagttttaataaacgaatag

SEQ ID NO: 92894 - DNA, 1083 bp, Enterococcus faecalis; identical to SEQ ID NO: 92886

SEQ ID NO: 92895 - DNA, 1695 bp, Enterococcus faecalis; identical to SEQ ID NO: 92887

SEQ ID NO: 92896 - DNA, 987 bp, Bacillus cereus m1550
atgcaaattagttttgctatgtggaagatttttgaattatatcaaaatgaagattttactgttgccatggattgtattgatgatgtggtcatatttaagacatcaaatgaaaaaccaaacattgtgacctatcaattgaaaaccaaagattctactgctggaaattttgaattgaaaagtttaataaataaagatgtatttttgaaaatgtatgaccatattgagaaaatagatgcagatattaaagaaatatatttaataaccaataaccctttaaaatataaacagaaaatggtcaatgcagaaaggattctatttgaaaatttagatgcagatattaagaagctgattgaagaaaatatgtctaagagcccgatctttgcagagaaaggattatcaccgaagtttatatattctttattagatatgtcttttcataatcatagagaaattagccaacaaaaattaaattctttattaatgaaacaaaaaatagatattagtataacagctgctgatgcactttttaatacgttacaggatattttaacaaccaaacaaaattatgagtttagtttacaagatgaatttaatactgtacttaataaaaagagttattcgaaaacagaattcgcatcattattagataactcaaaaaagattaatgaggatgttttaacctttgaggatatttgtgccgattataaaggcaaacgtttaggcttgaaagaagaaagcttatataggagagcgatggctagtgtcaaagaaaaatgtaataaatctcccaatatattacaaaatataaatagggatatttctctttatgctaaagaacaaattgatactaacgaagaattaacgagaagtggactagtcatacttttacaaaatgcttttgatgacaagataaatgttgagttatctaaagaagaaaaagaaattctgtatatgcaaaatattgaattaaccctaagggaggggtaa

SEQ ID NO: 92897 - DNA, 1656 bp, Bacillus cereus m1550
gtgattgaaaaaaaagcgaagagtgtagattttgaagatggcattaatattgttacaagtaaaggaaatcagctgggtaaatcaaccataatgaaatccatctattatacattgggcgcagaagtattttttgccgacagattaaatgtaaagagtaaaatccacatgttagaaacagaagttaatgataagaaatatacttttattagacatggtgatgttgttgtgataaaagacgttaaagaaatttttaagacgtcgaacgcttctgaattatcatctaagttgcatgaaatatttggatttagtgttttcttagaagataaacagaaaaaatacgtgatagctccaccagtgtttcgttacattccttattatattgaccaagaccatggttggacatcagaattgaaatcttttgataaattaggtcaattcgacaaaaaaagcagggatttattattttattatcatttaaatattcttgatgaagattatggagtaaagttgaaagaaaaaaaagaactagatgttgcaatgaatgatttgaaaactagaaaaaaagaggttttaggcttacttgcatacataagagagaatattacagcttttaatttagaaatggatattacagcattacaaattcaaaagagagaaatacttagtaaatataaaaagtatgcatatgatttgaataacatacgaagaacaattatagaatatcaagaagaaatatttaaaattgacaatgtaattgataatttaactagtactttgaaacaaaatgataaagtaagagaacatataaaacatcagtttgatgtagagtgtccgtattgcaataatcattttgaaatacaagctaaagacatattaaggattaattataatattgtagacttagaggcatcaaaattagaaatgctagatataaaagagaaattattggggaaaatgaaaaaagtaaaaaaagagtatgaagattatcaagctacgttgaaaactattgaagaagaaaaagttgattcagacaatacacttgaagacatactcaaatttaaaggattacaagaaactcaaaatcaactaaatacagaacttgtcaaaaatgctggtgacatagaagaaaagtcagaagacttaaaagaaataagaaaagatttaaaaaaatggcaggatgaaatagataaagctaacagtagttacaaggatatcttaaatttaaatctaattagatttaatacgaatgaacacgcgctccctgaaaaatataatattggaaaaaacctcaaagcatctggtagcggtcaagttcgagttaatttagctagagtatattcatttataaagcttcttgaagaatataaccctgaaggattaaaatatccattagtaattgattctcctaaaggtggagaacaaagtactacaaatagtgaattgattttaaggttgttgacagagaaagcgcaaatttcaaatcaaattattttagctacaattgattttgaaagtttttataatggagatacaaaaaaattcaacataattactttagaaaatgaaccttaccatttattatctactaaggattatgaaaataatcaagtgataattgatgactttgtctctttatactttgaagcaaatcaataa

SEQ ID NO: 92898 - DNA, 1122 bp, Bacillus cereus H3081.97
gtgaaaacaataattagtacagaacttagggaacaagcgggttctaacagctataacagatttgagtatcaagttcattggattgtctaccacatgatccaagagtacaaaaagaactctgaattttatatcttttgtgaatttcatgatgatatgactaaaacatccttattagaaaagccaaattgtgcagaattttttcaaataaaaactactgagagatttaaacaatggagtttaaagaacttgtttaaaacatataagaagcaaggagggggaattaaaaactcctttttgggttttttgttttataattttttgaagtttagtgaagaatgtacgaaatgtcattttgtttccaatattggtatggatgaaacagttagagtttggcagtctgttatagaagatcgaaaggaattaaaaacggaagaacccagtttatataatgaaataaaaggattacttagagaagaatacaaagatttggaaatagaggaattcaataatgtttttgagatttttattcaaaatacatttttatatcatggagaacttccactagaaaactatgaaaaagttgtcgcgggctctttttttgtaatgttagagaacgataaaatttacacttcaaatagtaataaaattcttaaagatttaatcgaagaggtaagaaaaaaaagtaaaaaaaagattcaaactcctattagttataatgctttaaaaaaagagaaaggaatttcatctgaaattttttcgaaaataaaggattacataacagatatagaagatgacgaacaaaaatattatgaattagaggaaacgttagaagagcaaagaatagggaattttaggattaagctcttaattcgattacttaaaattcataaaagaaaaacattagatttttctaatacattatatattaactctgctgaagaaattttagagataattgacgagactttattaaattattatgaaagtattgatgacttcgagtatttaaagacaactgtgttaaataaagtcattcaaaaatgtgagtgtattattagtaacaaggttggaatagataaagtattagtggaggcgttattttatgaaagattggttacataa

SEQ ID NO: 92899 - DNA, 1536 bp, Bacillus cereus H3081.97
atggaaaaggaatggaagaagattattgacatatatttattattttttcaagtagatttagaaaattattgtatagtcagagaaggagatttttataaaattttcaaaataacaggagataatgatggttatgaacaaataatagcaactgatagctttcatacatatagtgataaattaatggaaatgttagaagtatcaatggattgcattacaaacgatgggaaattaatttctgttaccccacctttgttgtttaggtttcaatatattgatcaagatcgtggatgggaaaaaattggtgagagtttctcaaacatgaagtatgttaaagattggaaaggaaatacaaataaatatgttagtggatttcaaggagaagatttttataagattaaaagggagaaagaaatatttaggcaagtaatagatgaatataatcataaacttgctcattttgaggagtttataggaaatctgaggctatcaatggatgggattgaaaatgcagactgtccaaatgatgaacaaaatgttaataataaggaagctgttaaggacctgtttaaccaattagatttcattgaaaaggaatgtattcaattagaagaaatgttatcaaagcttaaaaatcaaaggtatgagaaagtattagagcttagttttataaaagccagtgtaagtgaattagaagcagatcatcaatttgctatgcaagaagatgatacattaaaatgcccattttgtggtgtagtacatgataataatatcgagaatcgaattgaaatagtaaaagatatacaatcaggtaatgcacttgtgaaaattataaggaaggatatagaggaactagatttaaaaataagtaacctcataaagcaaaagaatgaatacaaactaaggtataaattcataaaaagaaaattagaaaaagaaaaagatagcatttcagtcattaatatatataaaaatgaagggaaactagaacttgttaatactagtttaagaaaacaagaggaagtaaaaaaaattatagataagggagtcgttcaaaaagaaaaattagaagagaaattagcggttttaaattccaacgagagaaggaataatatttataaggaattaaaaggttattgtagagaagtatttgacttattaaatttaccccattcagctataaaatttaatgattttgttcaaagattagagaaaacgggaagtgagcattcaagaatagtttatgcttatcatatatctttatacttatataatttgaatagatgtaaaagtccatttaatttattagtaatggatactcctaatcagcaaggtcaggatgcaaaaaaccttaagaatattgattcagtactagaattattaatgtctgaagaaggacaggttattattggtacggaaagagagactggctatgagagtgttgctaatactgtaactaaattatctgaagaaaagaaatgtcttaatacggaaaaatatcaaaaacatattgatatagttaatgctctaagtttttaa

SEQ ID NO: 92900 - DNA, 1068 bp, Bacillus cereus VD014
gtggatataagttcttatcctagcttggaaacttatgaagcacgtgagaatacaggttcaaggtcttcaaacagattagctatgcaaattagttttgctatgtggaagatttttgaattatatcaaaatgaagattttactgtggctatggattgtattgatgatgtagtcatatttaaaacatcaaatgaaaatccaactattgtgacttatcaattgaaaacaaaggatgctactacggggaactttgaactgagaaagctaattggtgataatgtatttttgaaaatgtatgatcacattgaaaaaatagatgcagatgttgaagaaatatatttaataactaacaatcctttgaaatttagaaagaaaacggttaatgcagaacggattttatttgaaaaattagatgaagatataaaagagttaattgaagaaaatatgtctcagagtaaagtttttgcagataaaggattatcatctaagtttatatattctttggtagatatgtcttttcataatcatagagaaatcagtcaatataaattaaattctttattaatgaaagaaaaaatagatattagtataacagctgcagatgcactttttaatgcattgcaagatattttaacaactaagcaaaattatgagtttagtttacaagatgaatttaatacggtactaaagaaaaaaagttactcgaaaacggaatttacatcactattggataactcgaaaaaaattaatgcctatgttttatctttcgaggatattcgtaccaactataaaagcaaacctttaaagctgaaagaagaaagtttatacaggagagcgatggctagtgttaaagaaaaatgcaataaatctcctaatatattacaaaatataaatgaagatatttttcaatatgctaaagagcagattgatatcaatgacgaaataacgagaattgagctagtcatacttttacaaagtgtttttgacgacaagataaatgttgagttatctaaagaagaaaaagaaattctatatatgcaaaatatcgaattagccctaagggagggataa

SEQ ID NO: 92901 - DNA, 1695 bp, Bacillus cereus VD014
atgaataaaataataattcgtaagttatttatatttgatgtgattgaaaaaaaagccaaaagtgtagattttgaagatggtatcaatattgttacaagtaaaggaaatcaactgggtaaatcaactataatgaaatctatttattatacattgggtgcagaagtgttttttgccgacagattaaatgtaaagagtaaaatccatatgttagagacagacgttaatgataagaaatatacctttattagacatggcgatgttgttgtgataaaagatggtaaaggaatttttaagacgtcgaacgcttctgaattatcatctaagttgcatgatatatttggatttagcgtttttctagaagataaacagaaaaaatatgtgatagctccacctgtatttcgttacattccttattatattgaccaagaccatggttggacatcagaattgaaatcttttgataaattaggtcaattcgataaaaaaagcagggatttattattttattatcatttaaatattcttgatgaagattatggagtaaagttgaaagagaaaaaagaactagatgcttcaatgactgatttgaaaactaggaaaaaagagattttaggcctactcgcatacataagagagaatattacagcttttaatttagaaatggatattacagcgttacaaattcaaaagagagaaatacttaataaatataaaaagtattcatatgatttgaataacatacgaagaaaaattttagaatatcaagaagaaatatttaaaattgacaatgtaattgataatttaaatagtactttgaaacaaaatgataaagtaagagaacatataaaacatcaatttgatgtagagtgcccgtattgtaataatcattttgaaatacaggcgaaagatatattaagaattaattataatattgtagacttagaggcatcaaaattagaaatgctagatataaaagaaaaattattggggaaaatgaaaaaagtacaaaaagagtatgaagattatcaagctacgttgaaagctattgaagaagaaaaagttgattcagaaaatacacttgaagacatactgaaatttaaagggttacaagaaactcaaaatcaactaaatacggaacttgtcaaaaatactggtgatatagaagaaaagtcagaagacttaaaagaaataagacgagatttaaaaaaatggcaggatgaaatagataaagttaacagtaggtataaggatatcttaaatttaaatctaattagatttaatacgaatgaacatgcactccctgaaaaatataatattggaaaaaacctcaaagcatctggtagcggtcaagttcgagttaatttagctagagtatattcatttataaagcttcttgaagaatataatcctacaggattaaaatatccattagtaattgactctcctaaaggcggagaacagagtactacaaatagtgaattgattttaagattgttgacggagaaagcgcaaatttcaaatcaaattattttagctacaattgattttgaaagtttttataatggagatactaaaaaattcaacataatctctttagaaaatgaaccttatcatttattatctgctgaagattatcaaaataatcaagtgataattgatgactttgtttctttatattttgaagcaaatcaataa

SEQ ID NO: 92902 - DNA, 1122 bp, Bacillus cereus; identical to SEQ ID NO: 92898

SEQ ID NO: 92903 - DNA, 1536 bp, Bacillus cereus; identical to SEQ ID NO: 92899

SEQ ID NO: 92904 - DNA, 1122 bp, Bacillus cereus
atggttcagtcaataatccaatcagaacttcgcgaacaagctggatcaaatagctttaatagatttgattatcaagctcattggactctttaccatatgattgaggaatataaaaaaaatatacctttttatgttttttgtgaatttcatgatgatatgactaaaacagaactttctgaacacccttcatgtgcagagtttttccaagtaaaaacaacagaaagttttaaagaatggacattgaaaagactattcaggacatacaaaaaaccaaatggagattttaagcactcgtttttaggtttcttattctataattttttaaaattcaaagatgaatgtactaaatgtcattttgtttctaatatagatatggatgaagatgtgagaaaatggcaggctgttattgaagataagaagctactaaaaaagaaagaacctaaattatacaatgagataaaagcatttctaaaaatagagtaccctagcctaaaagaacctgaatttacgtcagtttttgatacattcattcaaaatactttcttatattacggtggacttcctttagaaaattatgaaaaaagtgttgcaggtgccttcttcattatgcttgataatgaagatattttaacctcaacaggaaatagaatttttaaagatatattagaggatgtaaggaaaaaaagtaagaaaaaaattaaaacacctattagttataaatctcttaaagaagaaaaaggaatttcttcagaatcattctctagaataaaagatcaagtcgctacattctcaaaaagtgaacaagtatatcaagatataaaaatcaattttgaatctcacttaggtaaaatgaaaatgaaaatgttaattagattattagaaaaacataaacgaaaagtattagatagttccaatgttttgtatttggaatcttccgaagatatcctagaagctattgatgatatcctattagatcactacgataaactagatgatttagattttgttacaaaaaatatattaaatgaagtattagaaaaaagtaatactttaattgatgacggaattggtattaataaagtgttagtggaggcattattctatgaaagaatcgtttcgtaa

SEQ ID NO: 92905 - DNA, 1707 bp, Bacillus cereus
atgaacagattaactctaaaaaaactaatagtaattagtgaaagtgaaaagagatctagagaaatcgaatttaaagaaggccttaacattattattggaaaaaataaaactggaaaatcgtctcttattaaaagtatttttttcacttttggatgcgaggttaaatttgaggatgagtggaaaaaattaatcgataaatacctactatattttcaatatggaaataggtatttttgtatattaagaataaataaatcatataaaatcttcgaaactaatcaagaatttactagttatcaattaataattgaaactgattctttccatgattatagtaaagaattaatgaaactattaggtatatctatggattgtttaacaaagagtggaagcccaataacaataactcctcctttattatttagatttcaatatatcgatcaggacaaaggctgggagaaaattggccaaagcttcacaaatatgcaatatattaaagactgggatagcaatacaaataaatatgttgtaggattccttaatgaagaattttataaaacaaaaagagaccgagatattattaaaacagacatcgtaaactatgatataaaaataaatcattttgaggaatttataaaaaatctatcagcatcaataaacaaatcaaatactgaagatacttttgataaagacgataataatagatactctaacaataaagagctaaaccaaagtcttgtgaacaaaatggactccattgagaaagaaatcttagaactagtagaaaaactctctaaaataaaaaataaacgctatgaaaaaaccttagagctcaattttataaaagaaaatgtaaaagagctagaggcagatcacacatttgctattcacgaagatcctaatttaaaatgtccattttgtggctctgtgcatgaaaactctttagagaatagaattgaaatcgttaaagatatacagacaggtagtgaattagtagcactcttccgatcggagataaaagaactagattcaaaaatacataaacttagtacaagaaaaaaacagttaacactaaactataaatctcttaaaaagaatgttgaacaagtaaaagaaaatgtatctattatcaaatcttaccaagatcaaggaaaaatcgaaatgattgattcgagtataaaacaaaaagaagaaattatttcagcgagagatactaaaaacagtcaaaaattaatattagatgaccaattaaatcaactgaaatctccacaaagaagaaacttgatctcccaagcattaaaatcttattgtatgactgtttacgatatcttaaatatcccttcttctttcataaaactaagagatttcgtacagactttacaaaaaactggaagtgataatccaagaatgatttatgcttatcatatttctctctacttatataatttaaatagagaacacagtccatttaactttttagtaattgatacccctaatcaacaaggtcaagatgaagaaaacttaaaaagtattgattccgcattaagtttattaacatcaaaaaatggtcaagtaataattgggacagaaagagaaaccggacatgaagaaaacgctagtaaagtgacctatttaattgaagaaagaagatgtcttactagcataaattataaagaacatatcaaccttttacattcacttttataa

SEQ ID NO: 92906 - DNA, 1068 bp, Bacillus cereus
gtggatataagttcttatcctagcttggaaacttatgaagcacgtgagaatacaggttcaaggtcttcaaacagattagctatgcaaattagttttgctatgtggaagatttttgaattatatcaaaatgaagattttactgtggctatggattgtattgatgatgtagtcatatttaaaacatcaaatgaaaatccaactattgtgacttatcaattgaaaacaaaggatgctactacggggaactttgaattgaaaaagctaattggtgataatgtatttttgaaaatgtatgatcacattgaaaaaatagatgaagatgttgaagaaatatatttaataactaacaatcctttgaaatttagaaagaaaacggttaatgcagaacggattttatttgaaaaattagatgaagatataaaagagttaattgaagaaaatatgtctcagagtaaagtttttgtagataaaggattatcatctaagtttatatattctttggtagatatgtcttttcataatcatagagaaatcagtcaatataaattaaattctttattaatgaaagaaaaaatagatattagtataacagctgcagatgcactttttaatgcgttgcaagatattttaacaactaagcaaaattatgagtttagtttacaagatgaatttaatacggtactaaagaaaaaaagttactcgaaaacggaatttacatcactattggataactcgaaaaaaattaatgcctatgttttatctttcgaggatattcgtaccaactataaaagcaaacctttaaagcttaaagaagaaagtttatacaggagagcgatggctagtgttaaagaaaaatgtaataaatctcctaatatattacaaaacataaataaagatatttttcaatatgctaaagagcagattgatatcaatgacgaaataacgagaattgagttagtcatacttttacaaagtgttttcgacgacaagataaatgttgagttatctaaagaagaaaaagaaattctatatatgcaaaatatcgaattagccctaagggagggataa

SEQ ID NO: 92907 - DNA, 1695 bp, Bacillus cereus
atgaataaaataataattcgtaagttatttatatttgatgtgattgaaaaaaaagccaagagtgtagattttgaagatggcatcaatattgttacaagtaaaggaaatcaactgggtaaatcaactataatgaaatctatttattatacattgggtgcagaagtgttttttgccgacagattaaatataaagagtaaaatccatatgttagagacagaagttaatgataaaaaatatacctttattagacatggcgatgttgttgtgataaaagatgttaaaggaatttttaagacgtcgaacgcttctgaattatcatccaagttgcatgatatatttggatttagcgttttcttagaggataaacagaaaaaatatgtgatagctccgcctgtatttcgttacataccttattatattgatcaagaccatggttggacatcagaattgaaatcttttgataaattaggtcaattcgataaaaaaagcagggatttattattttattatcatttaaatattcttgatgaagattatggagtaaagttgaaagagaaaaaagaactagatgcctcaataactgatttgaaaactaggaaaaaagagattttaggcctactcgcatacataagagagaatattacagcttttaatttggaaatggatattacagcgttacaaattcaaaagagagaaatacttaataaatataaaaagtatgcatatgatttgaataacatacgaagaaaaattttagaatatcaagaagaaatatttaaaattgacaatgtaattgataatttaaatagtactttgaaacaaaatgataaagtaagagaacatataaaacatcaatttgatgtagagtgcccgtattgtaataatcattttgaaatacaggcgaaagatatattaagaattaattataatattatagacttagaggcatcaaaattagaaatgctagatataaaagaaaaattattggggaaaatgaaacaagtacaaaaagagtatgaagattatcaagctaccttgaaagctattgaagaagaaaaagttgattcagaaaatacacttgaagacatactgaaatttaaaggcttacaagaaactcaaaatcaactaaatacggatcttgtcaaaaatgctggtgatatagaagaattatcagatgacttaaaagaaataagacaagatttaaaaaaatggcaggatgaaatagaaaaagctaacagtagctataaggatatcttaaatttaaatctaattagatttaatacgaatgaacatgcactccctgaaaaatataatattggaaaaaatctcaaagcatctggtagcggtcaagttcgagttaatttagctagagtatattcatttataaagcttcttgaagaatataatcctaaaggattaaaatatccattagtaattgactctcctaaaggtggagaacagagtactacaaatagtgaattgattttaaaattgttgacggagaaagcgcaaatttcaaatcaaattattttagctacaattgattttgaaagtttttataatggagatactaaaaaattcaacataatcactttagaaaatgaaccttatcatttattatctgctgaagattatcaaaataatcaagtgataattgatgactttgtttctttatattttgaagcaaatcaataa

SEQ ID NO: 92908 - DNA, 1122 bp, Bacillus cereus; identical to SEQ ID NO: 92898

SEQ ID NO: 92909 - DNA, 1692 bp, Bacillus cereus
atgattctaaaaaaattaatagtaataagtaaaaaggaacataaatcgcgtgaaataaatctagataaaggactaaatatcataatagggaagaataaaacaggaaagtcatcactagttaagagtatatttcatactttagggtgcaatgtaaaaatggaaaaggaatggaagaagattattgacatatatttattattttttcaagtagatttagaaaattattgtatagtcagagaaggagatttttataaaattttcaaaataacaggagataatgatggttatgaacaaataatagcaactgatagctttcatacatatagtgataaattaatggaaatgttagaagtatcaatggattgcattacaaacgatgggaaattaatttctgttaccccacctttgttgtttaggtttcaatatattgatcaagatcgtggatgggaaaaaattggtgagagtttctcaaacatgaagtatgttaaagattggaaaggaaatacaaataaatatgttagtggatttcaaggagaagatttttataagattaaaagggagaaagaaatatttaggcaagtaatagatgaatataatcataaacttgctcattttgaggagtttataggaaatctgaggctatcaatggatgggattgaaaatgcagactgtccaaatgatgaacaaaatgttaataataaggaagctgttaaggacctgtttaaccaattagatttcattgaaaaggaatgtattcaattagaagaaatgttatcaaagcttaaaaatcaaaggtatgagaaagtattagagcttagttttataaaagccagtgtaagtgaattagaagcagatcatcaatttgctatgcaagaagatgatacattaaaatgcccattttgtggtgtagtacatgataataatatcgagaatcgaattgaaatagtaaaagatatacaatcaggtaatgcacttgtgaaaattataaggaaggatatagaggaactagatttaaaaataagtaacctcataaagcaaaagaatgaatacaaactaaggtataaattcataaaaagaaaattagaaaaagaaaaagatagcatttcagtcattaatatatataaaaatgaagggaaactagaacttgttaatactagtttaagaaaacaagaggaagtaaaaaaaattatagataagggagtcgttcaaaaagaaaaattagaagagaaattagcggttttaaattccaacgagagaaggaataatatttataaggaattaaaaggttattgtagagaagtatttgacttattaaatttaccccattcagctataaaatttaatgattttgttcaaagattagagaaaacgggaagtgagcattcaagaatagtttatgcttatcatatatctttatacttatataatttgaatagatgtaaaagtccatttaatttattagtaatggatactcctaatcagcaaggtcaggatgcaaaaaaccttaagaatattgattcagtactagaattattaatgtctgaagaaggacaggttattattggtacggaaagagagactggctatgagagtgttgctaatactgtaactaaattatctgaagaaaagaaatgtcttaatacggaaaaatatcaaaaacatattgatatagttaatgctctaagtttttaa

SEQ ID NO: 92910 - DNA, 1113 bp, Bacillus mycoides Rock1-4
atgggtgcattgaataaaatattttctacaaagccacctgaaaatagtggctctcgatcggcaaaccgttttagtttccaaaaaaattgggctttaataaagattcttgaattacataaagataaactagattattcaattgttcttgattatcatgacgatgttcttgtactagattcggagtcgaaccccgagaaaattgatttttatcaaatcaaaacaaaaagtacaggtaaatcaaattggacaattgctgcattaagtaaatttagtgaaggcaaagataagcaaattctgaactctatgttgggcaaactttataaaaataaactgaatttcccgaaggaaactaagtcattaaattttgtttccaataaagcatatactattaaactaaatgataataaaaatgccaaggattcagcggcgatacttattcctttttcaacaatatgtactacagaaagagaaaaagttgaaaaagaattaaaaaaggaaatgaatattacagaatgtggtgatatttttgattgtacttttttacacattacgccattgagccttacagaaagtaaggaacatgcaattggtaagtcttctcaaattttaagagaaatgggatattttaaagtagatccagatttattctacaaatttttatacggagaaattgagttaagaaatgattgtgaaatggaatttcattctttagaagattttattaaacataagtctttagcaaagagcgctgtccagtcaattataaatcatttaaatcccaaagatgatttaaatgataaatggaatagaattaatgaagagttgagagcaacaaatcattttaagctttatgatttaaaacagctagaaagtaaatggaaagaatgggaattgcgaattttaactaatgacttaacactgatttcgactataaaaaatgcaatcaacgaattaataaaaattaatttgcacaaatgttccagtgtttatgatcttcttattaaggtgtatgaggaatatatgttgttagataaagaatacccagaagatttgtttaataaatatgaaatacaagcgttaatattgatgcaatatacgataattgagttataa

SEQ ID NO: 92911 - DNA, 1452 bp, Bacillus mycoides Rock1-4
atggtaaaagagaaaaatagatattcattatttaatcatcaaaagaacttaattggatcatgggataaagtaactgaagaattggcacctgagatggcaaaattgttaggttacaagttaactttaccaaacagaagaagtaaagaagtaatcccacctcccgcttattttttcttaccattttacatagatcaagataaaagttggaatcaagaatggtcttcttttgagaatttatcacagtttgctaattggaaagatattgtaattcaatatcatgcaggtgtacttacagataaatattttgaagtatctaatcaaataatgatggatcaagctcaaaaggatattaatactaaaaattatgattctctacagtatgctcttcgtagatttgaaaatgaattaaaggttagtcaaacttttaacattgaatctgatgattttaaggaagaaattaattctcttattaaagaactagaacaattacaattggttgaagatgagtggaaggcacagcttactgatctatataacgatagattaatccttaaacagaggaagaagtctattgaacaaatattaaatggatctcaagttgactatagtaaaatatataacaaatgtaaaacatgtggctcacagcatcaagatagttttaccgcacgtttaaaagctgctgaaacagaagctaagtgtcaccaattattaaatgaaattgctattaaattaaaacgtttagatgaaaatataaaagaagtaaatcaaattttcacgcaaaaaggaaaagaaaaagaaaatttaaataacatcttaatttctaaaagaggggctttaacaataaaggagataataagtctagaaggttcataccaatttaaaactaaaattcaagaggacttatatagggaattagagaaagtaaatgaactggaaataaaattggctaatttaagaaaacaaaaaaaacaaatcaaaagcgatacaagaaaaacagaaattaccacagaatatataaattgtatgacttattttctggagaaactaaatgtaaaaaatatttcattaaaatcttataatagtttaaaaagcaaaattaaagagcaagggagtcatcaaccacgtgctttacttgcatactatttgagtatattgaaattaattgagaaacattcaacttcaactttatgtcctatagtaattgattcaccaaaccaacaagatcaaagtgaagaaaatttaaacaaaatgttaaatgctattatgaatgaacgtcctaaaaattcacagttaatattagcagttgtagaaagacccaatactgaaattcagggtagtcatataatgataaattttaaccaagagcatcgtttgttagaggaaaaagaatataatactgtgttaaaagaggtagaaaatatacttactgattcttcattatctaaattataa

SEQ ID NO: 92912 - DNA, 1110 bp, Bacillus thuringiensis serovar andalousiensis BGSC 4AW1
atggaggtaggtgagactttgaatgttcgtgaggcaatagtatctaatcgaccacgtgaaaatagtggttctaaaagtgcaaatagatttgattatcaaaaaaactgggcactttgtaaattatttgaaattcatttaagtaaggatgattatttaatagtatttgactaccatgaggacatcattctgacagatagtgaaactaaccctcaaaaaatcactttttatcaaataaaaacaaaagaaactagtcattggaatattacagatttggttcgcccgaaaaagacaaaagattcttctaaagcattttcaaaaatcggaagtttatataagaataaacttcttttcaaggaagttgcagatagcttacactttgtttctaatacttactacaacgtagaattagaagatgaaactcccgcgaataatattaaagaattatgtatatctaggttaactgaaagccaaaaaaaaacaatcattgctaagttaaagaaagagcttgaattagaaaacttacaaattgaaaaagatctgctctatctagatatttcaccgttgagcttaaaagaaaatgctgagcacgctaaaggtcatttagtacagttcttagagaaaattgatcctaacttaagatataacggaaatataatatacagtgtattatttgatgaaataaacagaaggaataattacgagtgggatgttgaggattttgaagagataaaaaaatataaaggaattggaaaatcagaattcagcaatatggttgataagatagtaactagttcccaaagtagtgatctatggaatgaattaaaaacagacatagatgaattaaagttaaatttaaaaatgaaaaaacaacttagaaaacaattttttaaatatgaaacagaaagaatgaatcattccaatactcatttacaaaatacacgttcagcaataataaaattaatttctaaacatgaagaaaattgtgaaagcctaaaagaattgatggctgcagttctgactgaatttaatacttcatataaattaaatgatggtattttttccgaagaatatattatggcaattatattaatggagttttggttatcatga

SEQ ID NO: 92913 - DNA, 1656 bp, Bacillus thuringiensis serovar andalousiensis BGSC 4AW1
atgaaggaaaaaaggtccaaggaaataacatttcacgaaaaagtaacaataattaacgggattaatgacacaggtaaatcagcattaataaaaagcatcttttatacattcggtgccaatacaaaattgcaagctaagtggaaaaaagcaaatatagttagctgtgtcacttttaaatttcaaaataatgattataaaatgcttagatataaagatcaattcgggttattcgataatgaggataaattaatacaatcgttttatagcgtaactgacgagcttgctccttattttgctaatttatttaacttcaaaatagaattaaaggatagtaacaatagaatgctacaggtaccgcctgctttttgcctattaccattttatatagatcaagacaatggttggcaaaaaacttggagttcatttgaacaattaggtcaactaaaatatggctggaagaagaatattattgacttccatactggcgcaagacccagtgaatactattccttaaaaaaagaaaaagatgaattattatcctataaacaacagcatagtgaagaacaaaaagaattagatagattgtaccttaggactgtaaaaaaattcggtacaaccgatgtaagtgttgatattgacgaatttgagaaggaaattgaaatcctattaaatcagctaaataataaacaaacagatttagaatacgctaaagaaaatctggtaggattatataatgatagatatatgatcgaagatcaaataaacttaacaaattccgtaatggacgaactaaataaagactatacatttgcaacaaaaaacatacttgaagataaagttacctgtcctacttgtggagaaatatacagcaatagctttaatgaaagattttccattgctaatgatgaaagccgttgttttgaacttattgcagacttaaaaaaggatttacaaaagatcaacaaaaaaattgatatacaaaaaaaagaattaaacaatataaaagaagattttaaggaaatacatacactcctacaaactaaaaaaaagcaagtggcattaaatgatgtaattcaaaacgaaggtaagagaatgttgttaagtagtttagctacagacatcgcacatgtacgttctatcatcttagacttggaagaacaaataaaaacaaaagatgatgaactaaaaaatattgataataaagaaaaaagaaaaataataaaaacagagtatctagattatatgaatgaatttctattagaacttgatgtaaaaacattaagcacagaagattttaagaatcttgatactacaattaaagaatctggtagtgatgtaccacgagcactccttgcatattttttcagtattttaaaattaatagtagcaagatcaacatcaacattatttccaattattattgattctccactacaacaagaacctgatgatgaaaataaagttagaattttagaatttataaagaaaaatactccacaagatgcacaactaatactaagtacagtagactccgcaaatgtaaattttgaaggatccactatactacttaataaaaaattacatgtactagatgatcaagattatgaaaaacattggaagcaacttaaattgctattagaacagctttctaattaa

SEQ ID NO: 92914 - DNA, 1008 bp, Peptoclostridium difficile 002-P50-2011
atgaacttaccaaaagatttatcaggaagcattgctaaaaatcgctttagattagaattattatggggaatcagtaagataatcgatgaacataaagcgaacaatgaatatacgataatttttgattttaaatgtgatatagaattgcataaagaggatgaattggatttttatcaaatcaagacgaaaaaaagtggtaattacaattcgaataatttgtgtaagaaaggtaagaataagaacaattctattttagggaaactatatgctttatattcaccgaactacaatataaaattagcaattgtgtgtaataaacaacttaaaatcaataataaagaaattgattttcctgagcaatgttttggagatttagatcaggatgtacttgatgatgttaggaaaaagttgtgtacagaattaaatttagacactgtatgtttagataatgtgttttatatatttgataacatggatttattaaatccagaggattctattagagggaaattagtaaaatcttttgttgatattaaaggtgaagaacctcaaaatccgaatgcattgtatagactggttgttgattctgttaaagaaaaagcttcttatgaatttgattccggtacttatgaagatgttgtaaaaaacaaaggtattacaagaagtgaatttgataaaatgttaaatgcacataaaaaggaatctaaaaatggaatcaatgaaacacaggagtatataaataacttgtcatttgctaaacgaagaagatacaatacggcacttggtaatatacttgaaacacagcaaagtgagtctttacgattaataaaaataaaaatttataattatattgtggaacatgaaaattcgttagacgatattgaaagttatttaaaagaaatatcaaaattatttgatgacgattttgatgtggaatttactgatgatatgaaatcggttcaatacataatgatttattatatgtatgcttcaggaggaattttataa

SEQ ID NO: 92915 - DNA, 1683 bp, Peptoclostridium difficile 002-P50-2011
atgaatgttatatttgacaaaatatatatatttgatgttgtaaaaaaaaaggcttattcaacagaatttaaaaaaggagttaatattattacatcgagtgatatagacggaacagatagaggaaaatcagttttattaagaagtttataccatgccttgggtgcggattctcactttgactcgaagtggggagaaaaggataaggtctatatcttattttttaaggtggatgataaagatttttcgatttatagatctcaaaaattatttaaaatatttaatgcaaaaggtgatcttatttttactactattcatagaagtgaattagcagatttttttggaaatttatttaatttttctatatgtttgccacaaaaaaatacaaatcaattagtaatagcaccacctgcatatagttttttgctgaattttttagatcaagatgaatacatcggtacaaaatttaattcgtttaaaaaccttgctcagttcagtaattttaaacttaatgttatttactcacatttgggcatttacaataaagaatatttcgaacttgtgaaacacaaagaagaattagaacttgaaattaaaagtaagaaagaagaaatagaagacctaattaaaatgaaagacagaaccattttaattttggatggtttttcatgtccggaaacaagcagtgcattagaaaatgagcttaatatagaaactcaaaaatattcatcgctaattaatgagatgaatttagtaaggaataagcttgttgacttgagaaatcaattagttgaacagaatatcactttatctcaaatatctaaattcgaaataaaagaagaaaaggaaataaaaactattttaaaatcaaaagtttgtcctgaatgtcattctgttttagattcaactttggaactaaggagtaagagatataatcatattgataatgctcttagtctgaaagatgcaataaaaacagaaaatgcccatattgaagatgaaatactcaaaaatgagggaatatattcaaacttaactttggttttggaggagcataataaaaaaatttgtaaaaacaaaaaggaaatcaaagactatatcaagttcagaggactaaataaactaatcgatgagattaataatgatttgactattaatagcagagttatagacagtacaaaggaggctctaaagccactaaagaaagaatttaaaagtgttaaagataaaattaaatctgttgatgaaaattactattatttgattgataaattaaaaataagattcaatttaaatgagttagaagctgacagttatgaacaactatctaaaaatttttgtgcaagtggaagcaacaaaccattatcaaccgttatatggtatctaacactcaatgatttaaaacagaaatttaatcctgaaggaacaacatttccaatggtttttgatagccctaacaatgcggagacagatcaagagaagaagcaggcattagtcgagtatattatggaatcatcagatcaatttagccagttaattgtttcggcaataggattttcagaaaaagattatagcattgattcgaatataaatataaaagttttagaaaatgaaaaatatagcttactaaatagtgagatgtatgttcagaattatgagcttttacaatgtatgaacgatgcttaa

SEQ ID NO: 92916 - DNA, 1065 bp, Peptoclostridium difficile 002-P50-2011
atgtcaaaaattgaatactatatgaatttaccctatgatttatcaggatcaatgtctaagaatagatttagaaatgaactactttggggattgaaaaaaatgtatgagttatataagacgaatgaagattttgtagtagtttttgattatagatgtgatattgaagttcatttagaaaataaatttgaattttatcaagtgaaaactcaaaataattcaggtacatatacgataaataaacttactgataaaaaaaaaggtagtaaatcagtagtagggaatttatatagcttgaaatatgatataaatatgaatgagattgatgatgtttatgttgcaattgtatcaaatgctcctttgaacgatggtaaaaaaacatataataattctcatgaagttaaaataaaaacaatagatagtagtgctatagaaaagataaagttaagtataaaaaatgacttaaatatagatgaagatataaatttagaaaatttattttttattagaattggtttagatttaattgaaccacaaaaaactttaattggtgaaactgctatattttttgaagatgtttttggaagggaatgtagtaaagtaaaatcattatacaatgtcttatatgaagagatatatagcaaatcagcatatgagttagatataaatacgtatgaaaatatagtatctaagaaaggtattaatagagataggatggatattatattaaaaagttatgctaataatacagataagtcagtagaactagcaaaatatagtataaatgaatggtacaagaataatttctcacgtagattatctttgataaaatcattaactacaattgtatctaaattaagtgaaagtagtattttaaaggatatagaaaactgtatattgtcatatatatataataatatagataaattacaagtatcagataaagagttaattgaaattataagtgagatagtagaagaaaagaggcctatagaagttagcaagacagatatagaagctcttatcttactaacattaaaaaagtatgaggagggtgtttatgaatag

SEQ ID NO: 92917 - DNA, 1674 bp, Peptoclostridium difficile 002-P50-2011
atgaatagtttgtttgtgaacagtctatatatatttgaatatgaaagtaaaatggcgaagaaaatagactttaaacatgggattaatatattaacatcagatgaaaagagtggtaatgacgtaggaaaatcagtactattgaaaagtatttatcacactttaggagcagatagtatatttgatcatatgtggaataaaattacaaaaacatatatattaaatgttactataaaaaataagacatactatgtatatagaagagataatttatttaaaatatataatacgaattttaaaaaaatatttatgacaaataaccgtgatgaattatctaattatttaagtgatttatatagttttaaggtaatgctgccaaaaagagaaaatgaagaattagagttagcacctcctgtatatagttatttgcttaactatatagatcaggatcatttagatggatctaaattttcatcttttaattcattgacacaatttcctaactataaggaaaatgtaatttatactcattttggactttttgatgaagagtactataaagctataaaggagttagaaatattaaaatcagaagaaaaaaataagaaaaaagaacgagaagttactttgaatatgctaaataaaataaaaagttacttaggaaacttagatgcaccagaaagtatagaagttttaaatatagaattaaataaaactaaagaagaatattcgaatatagttataaacttgcaaaaaataaaaaataatttaatgaaaataaggaatgaaaaagtagatttagaattaaacataaaagaaattgaattaacaagaaggaatgaaatgaagaagttaaaagttaaaaatgtgtgcccaagctgttcacatgaaatagaagatatagattctaaatttataataaataatcaaatagaagatcttattattcttaaagatgagttagagtcagaaattataaagtgcaatagagttatagaaaagaaagaggaagaatatcaatcactattagataaacttcatgagtatgagtcaaatatgaaaataaatgatgatagcatatctaatgtcttaaagcataaggcatatatagatactaaagatgatatagttttagatttagaaataatagataaaaaaataaaagaaatacaacagacaatagagccatatgataaaaaaataaaagaatacaacagtcttaagaagaaggcaaatgctaagtatgaagagttaatgaaaaaggctaaaaaagactttggattagaagagatagatgaaaataaaataaaaaatataaaaaataactttatagcaagaggtagtaatagagcaataactactataatgtggtatctgacattgttagcagtaaaatatgaatttaatgaaaatgcaataaagtttccactaattttagatagtccaaataatgttgaatctgacgagataaaggaagaatcattgtttaaatatatatttaaaaatactaaaacagatactcaattaatattatcatcgttagggttcaatgaaatgcaatttagtgaatttaagtttgataatataataaaacttgaaaatagcaaatataatttattaaataaagaggattattataataatatagatattttaaataaaatatttgaaaattag

SEQ ID NO: 92918 - DNA, 1008 bp, Peptoclostridium difficile 050-P50-2011; identical to SEQ ID NO: 92914

SEQ ID NO: 92919 - DNA, 1683 bp, Peptoclostridium difficile 050-P50-2011; identical to SEQ ID NO: 92915

SEQ ID NO: 92920 - DNA, 1065 bp, Peptoclostridium difficile 050-P50-2011; identical to SEQ ID NO: 92916

SEQ ID NO: 92921 - DNA, 1674 bp, Peptoclostridium difficile 050-P50-2011; identical to SEQ ID NO: 92917

SEQ ID NO: 92922 - DNA, 1065 bp, Peptoclostridium difficile CD3
atgtcaaaaattgaatactatatgaatttaccctatgatttatcaggatcaatgtctaagaatagatttagaaatgaactactttggggattgaaaaaaatgtatgagttatataagacgaatgaagattttgtagtagtttttgattatagatgtgatattgaagttaatttagaaaataaatttgaattttatcaagtgaaaactcaaaataattcaggtacatatacgataaataaacttactgataaaaaaaagggtagtaaatcagtagtagggaatttatatagcttgaaatatgatataaatatgaatgagattgatgatgtttatgttgcaattgtatcaaatgctcctttgaacgatggtaaaaaaacatataataattctcatgaagttaaaataaaaacaatagatagtagcgctatagaaaagataaagttaagtataaaaaatgacttaaatatagatgaagatataaatttagaaaatttattttttattagaattggtttagatttaattgaaccacaaaaaactttaattggtgaaactgctatattttttgaagatgtttttggaagggaatgtagtaaagtaaaatcattatacaatgtcttatatgaagagatatatagcaaatcagcatatgagttagatataaatacgtatgaaaatatagtatctaagaaaggtattaatagagataggatggatattatattaaaaagttatgctaataatacagataagtcagtagaactagcaaaatatagtataaatgaatggtgcaggaataatttctcacgtagattatctttgataaaatcattaactacaattgtatctaaattaagtgaaagtagtattttaaaggatatagaaaactgtatattgtcatatatatataataatatagataaattacaagtatcagataaagagttaattgaaattataagtgagatagtagaagaaaagaggcctatagaagttagcaagacagatatagaagctcttatcttactaacattaaaaaagtatgaggagggtgtttatgaatag

SEQ ID NO: 92923 - DNA, 1674 bp, Peptoclostridium difficile CD3
atgaatagtttgtttgtgaacagtctatatatatttgaatatgaaagtaaaatggcgaagaaaatagactttaaacatgggattaatatattaacatcagatgaaaagagtggtaatgacgtaggaaaatcagtactattgaaaagtatttatcacactttaggagcagatagtatatttgatcatatgtggaataaaattacaaaaacatatatattaaatgttactataaaaaataagacatactatgtatatagaagagataatttatttaaaatatataatacgaattttaaaaaaatatttatgacaaataaccgtgatgaattatctaattatttaagtgatttatatagttttaaggtaatgctgccaaaaagagaaaatgaagaattagagttagcacctcctgtatatagttatttgcttaactatatagatcaggatcatttagatggatctaaattttcatcttttaattcattgacacaatttcctaactataaggaaaatgtaatttatactcattttggactttttgatgaagagtactataaagctataaaggagttagaaatattaaaatcagaagaaaaaaataagaaaaaagaacgagaagttactttgaatatgctaaataaaataaaaagttacttaggaaacttagatgcaccagaaagtatagaagttttaaatatagaattaaataaaactaaagaagaatattcgaatatagttataaacttgcaaaaaataaaaaataatttaatgaaaataaggaatgaaaaagtagatttagaattaaacataaaagaaattgaattaacaagaaggaatgaaatgaagaagttaaaagttaaaaatgtgtgcccaagctgttcacatgaaatagaagatatagattctaaatttataataaataatcaaatagaagatcttattattcttaaagatgagttagagtcagaaattataaagtgcaatagagttatagaaaagaaagaggaagaatatcaatcactattagataaacttcatgagtatgagtcaaatatgaaaataaatgatgatagcatatctaatgtcttaaagcataaggcatatatagatactaaagatgatatagttttagatttagaaataatagataagaaaataaaagaaatacaacagacaatagagccatatgataaaaaaataaaagaatacaacagtcttaagaagaaggcaaatgctaagtatgaagagttaatgaaaaaggctaaaaaagactttggattagaagagatagatgaaaataaaataaaaaatataaaaaataactttatagcaagaggtagtaatagagcaataactactataatgtggtatctgacattgttagcagtaaaatatgaatttaatgaaaatgcaataaagtttccactaattttagatagtccaaataatgttgaatctgacgagataaaggaagaatcattgtttaaatatatatttaaaaatactaaaacagatactcaattaatattatcatcgttagggttcaatgaaatgcaatttagtgaatttaagtttgataatataataaaacttgaaaatagcaaatataatttattaaataaagaggattattataataatatagatattttaaataaaatatttgaaaattag

SEQ ID NO: 92924 - DNA, 1065 bp, Peptoclostridium difficile CD8
atgtcaaaaattgaatactatatgaatttaccctatgatttatcaggatcaatgtctaagaatagatttagaaatgaactactttggggattgaaaaaaatgtatgagttatataagacgaatgaagattttgtagtagtttttgattatagatgtgatattgaagttcatttagaaaataaatttgaattttatcaagtgaaaactcaaaataattcaggtacatatacgataaataaacttactgataaaaaaaagggtagtaaatcagtagtagggaatttatatagcttgaaatatgatataaatatgaatgagattgatgatgtttatgttgcaattgtatcaaatgctcctttgaacgatggtaaaaaaacatataataattctcatgaagttaaaataaaaacaatagatagtagcgctatagaaaagataaagttaagtataaaaaatgacttaaatatagatgaagatataaatttagaaaatttattttttattagaattggtttagatttaattgaaccacaaaaaactttaattggtgaaactgctatattttttgaagatgtttttggaagggaatgtagtaaagtaaaatcattatacaatgtcttatatgaagagatatatagcaaatcagcatatgagttagatataaatacgtatgaaaatatagtatctaagaaaggtattaatagagataggatggatattatattaaaaagttatgctaataatacagataagtcagtagaactagcaaaatatagtataaatgaatggtgcaagaataatttctcacgtagattatctttgataaaatcattaactacaattgtatctaaattaagtgaaagtagtattttaaaggatatagaaaactgtatattgtcatatatatataataatatagataaattacaagtatcagataaagagttaattgaaattataagtgagatagtagaagaaaagaggcctatagaagttagcaagacagatatagaagctcttatcttactaacattaaaaaagtatgaggagggtgtttatgaatag

SEQ ID NO: 92925 - DNA, 1674 bp, Peptoclostridium difficile CD8; identical to SEQ ID NO: 92923

SEQ ID NO: 92926 - DNA, 1065 bp, Peptoclostridium difficile CD9; identical to SEQ ID NO: 92924

SEQ ID NO: 92927 - DNA, 1674 bp, Peptoclostridium difficile CD9; identical to SEQ ID NO: 92923

SEQ ID NO: 92928 - DNA, 1029 bp, Peptoclostridium difficile CD42
atgtctaaagaaaagtactacatgaacttaccaaaagatttatcaggaagcattgctaaaaatcgctttagattagaattattatggggaatcagtaagataatcgatgaacataaagcgaacaatgaatatacgataatttttgattttaaatgtgatatagaattgcataaagaggatgaattggatttttatcaaatcaagacgaaaaaaagtggtaattacaattcgaataatttgtgtaagaaaggtaagaataagaacaattctattttagggaaactatatgctttatattcaccgaactacaatataaaattagcaattgtgtgtaataaacaacttaaaatcaataataaagaaattgattttcctgagcaatgttttggagatttagatcaggatgtacttgatgatgttaggaaaaagttgtgtacagaattaaatttagacactgtatgtttagataatgtgttttatatatttgataacatggatttattaaatccagaggattctattagagggaaattagtaaaatcttttgttgatattaaaggtgaagaacctcaaaatccgaatgcattgtatagactggttgttgattctgttaaagaaaaagcttcttatgaatttgattccggtacttatgaagatgttgtaaaaaacaaaggtattacaagaagtgaatttgataaaatgttaaatgcacataaaaaggaatctaaaaatggaatcaatgaaacacaggagtatataaataacttgtcatttgctaaacgaagaagatacaatacggcacttggtaatatacttgaaacacagcaaagtgagtctttacgattaataaaaataaaaatttataattatattgtggaacatgaaaattcgttagacgatattgaaagttatttaaaagaaatatcaaaattatttgatgacgattttgatgtggaatttactgatgatatgaaatcggttcaatacataatgatttattatatgtatgcttcaggaggaattttataa

SEQ ID NO: 92929 - DNA, 1683 bp, Peptoclostridium difficile CD42; identical to SEQ ID NO: 92915

SEQ ID NO: 92930 - DNA, 1029 bp, Peptoclostridium difficile CD132; identical to SEQ ID NO: 92928

SEQ ID NO: 92931 - DNA, 1683 bp, Peptoclostridium difficile CD132; identical to SEQ ID NO: 92915

SEQ ID NO: 92932 - DNA, 1029 bp, Peptoclostridium difficile CD159; identical to SEQ ID NO: 92928

SEQ ID NO: 92933 - DNA, 1683 bp, Peptoclostridium difficile CD159; identical to SEQ ID NO: 92915

SEQ ID NO: 92934 - DNA, 792 bp, Peptoclostridium difficile CD165
ttgtgtaagaaaggtaagaataagaacaattctattttagggaaactatatgctttatattcaccgaactacaatataaaattagcaattgtgtgtaataaacaacttaaaatcaataataaagaaattgattttcctgagcaatgttttggagatttagatcaggatgtacttgatgatgttaggaaaaagttgtgtacagaattaaatttagacactgtatgtttagataatgtgttttatatatttgataacatggatttattaaatccagaggattctattagagggaaattagtaaaatcttttgttgatattaaaggtgaagaacctcaaaatccgaatgcattgtatagactggttgttgattctgttaaagaaaaagcttcttatgaatttgattccggtacttatgaagatgttgtaaaaaacaaaggtattacaagaagtgaatttgataaaatgttaaatgcacataaaaaggaatctaaaaatggaatcaatgaaacacaggagtatataaataacttgtcatttgctaaacgaagaagatacaatacggcacttggtaatatacttgaaacacagcaaagtgagtctttacgattaataaaaataaaaatttataattatattgtggaacatgaaaattcgttagacgatattgaaagttatttaaaagaaatatcaaaattatttgatgacgattttgatgtggaatttactgatgatatgaaatcggttcaatacataatgatttattatatgtatgcttcaggaggaattttataa

SEQ ID NO: 92935 - DNA, 1683 bp, Peptoclostridium difficile CD165; identical to SEQ ID NO: 92915

SEQ ID NO: 92936 - DNA, 1014 bp, Peptoclostridium difficile CD175
atgtctaagaatagatttagaaatgaactactttggggattgaaaaaaatgtatgagttatataagacgaatgaagattttgtagtagtttttgattatagatgtgatattgaagttcatttagaaaataaatttgaattttatcaagtgaaaactcaaaataattcaggtacatatacgataaataaacttactgataaaaaaaaaggtagtaaatcagtagtagggaatttatatagcttgaaatatgatataaatatgaatgagattgatgatgtttatgttgcaattgtatcaaatgctcctttgaacgatggtaaaaaaacatataataattctcatgaagttaaaataaaaacaatagatagtagtgctatagaaaagataaagttaagtataaaaaatgacttaaatatagatgaagatataaatttagaaaatttattttttattagaattggtttagatttaattgaaccacaaaaaactttaattggtgaaactgctatattttttgaagatgtttttggaagggaatgtagtaaagtaaaatcattatacaatgtcttatatgaagagatatatagcaaatcagcatatgagttagatataaatacgtatgaaaatatagtatctaagaaaggtattaatagagataggatggatattatattaaaaagttatgctaataatacagataagtcagtagaactagcaaaatatagtataaatgaatggtacaagaataatttctcacgtagattatctttgataaaatcattaactacaattgtatctaaattaagtgaaagtagtattttaaaggatatagaaaactgtatattgtcatatatatataataatatagataaattacaagtatcagataaagagttaattgaaattataagtgagatagtagaagaaaagaggcctatagaagttagcaagacagatatagaagctcttatcttactaacattaaaaaagtatgaggagggtgtttatgaatag

SEQ ID NO: 92937 - DNA, 1674 bp, Peptoclostridium difficile CD175; identical to SEQ ID NO: 92917

SEQ ID NO: 92938 - DNA, 1029 bp, Peptoclostridium difficile CD175; identical to SEQ ID NO: 92928

SEQ ID NO: 92939 - DNA, 1683 bp, Peptoclostridium difficile CD175; identical to SEQ ID NO: 92915

SEQ ID NO: 92940 - DNA, 1029 bp, Peptoclostridium difficile CD175; identical to SEQ ID NO: 92928

SEQ ID NO: 92941 - DNA, 1683 bp, Peptoclostridium difficile CD175; identical to SEQ ID NO: 92915

SEQ ID NO: 92942 - DNA, 1029 bp, Peptoclostridium difficile DA00261; identical to SEQ ID NO: 92928

SEQ ID NO: 92943 - DNA, 1683 bp, Peptoclostridium difficile DA00261; identical to SEQ ID NO: 92915

SEQ ID NO: 92944 - DNA, 1029 bp, Peptoclostridium difficile DA00275; identical to SEQ ID NO: 92928

SEQ ID NO: 92945 - DNA, 1683 bp, Peptoclostridium difficile DA00275; identical to SEQ ID NO: 92915

SEQ ID NO: 92946 - DNA, 1029 bp, Peptoclostridium difficile DA00044; identical to SEQ ID NO: 92928

SEQ ID NO: 92947 - DNA, 1683 bp, Peptoclostridium difficile DA00044; identical to SEQ ID NO: 92915

SEQ ID NO: 92948 - DNA, 1029 bp, Peptoclostridium difficile DA00065; identical to SEQ ID NO: 92928

SEQ ID NO: 92949 - DNA, 1683 bp, Peptoclostridium difficile DA00065; identical to SEQ ID NO: 92915

SEQ ID NO: 92950 - DNA, 1014 bp, Peptoclostridium difficile DA00065; identical to SEQ ID NO: 92936

SEQ ID NO: 92951 - DNA, 1689 bp, Peptoclostridium difficile DA00065
atgaggagggtgtttatgaatagtttgtttgtgaacagtctatatatatttgaatatgaaagtaaaatggcgaagaaaatagactttaaacatgggattaatatattaacatcagatgaaaagagtggtaatgacgtaggaaaatcagtactattgaaaagtatttatcacactttaggagcagatagtatatttgatcatatgtggaataaaattacaaaaacatatatattaaatgttactataaaaaataagacatactatgtatatagaagagataatttatttaaaatatataatacgaattttaaaaaaatatttatgacaaataaccgtgatgaattatctaattatttaagtgatttatatagttttaaggtaatgctgccaaaaagagaaaatgaagaattagagttagcacctcctgtatatagttatttgcttaactatatagatcaggatcatttagatggatctaaattttcatcttttaattcattgacacaatttcctaactataaggaaaatgtaatttatactcattttggactttttgatgaagagtactataaagctataaaggagttagaaatattaaaatcagaagaaaaaaataagaaaaaagaacgagaagttactttgaatatgctaaataaaataaaaagttacttaggaaacttagatgcaccagaaagtatagaagttttaaatatagaattaaataaaactaaagaagaatattcgaatatagttataaacttgcaaaaaataaaaaataatttaatgaaaataaggaatgaaaaagtagatttagaattaaacataaaagaaattgaattaacaagaaggaatgaaatgaagaagttaaaagttaaaaatgtgtgcccaagctgttcacatgaaatagaagatatagattctaaatttataataaataatcaaatagaagatcttattattcttaaagatgagttagagtcagaaattataaagtgcaatagagttatagaaaagaaagaggaagaatatcaatcactattagataaacttcatgagtatgagtcaaatatgaaaataaatgatgatagcatatctaatgtcttaaagcataaggcatatatagatactaaagatgatatagttttagatttagaaataatagataaaaaaataaaagaaatacaacagacaatagagccatatgataaaaaaataaaagaatacaacagtcttaagaagaaggcaaatgctaagtatgaagagttaatgaaaaaggctaaaaaagactttggattagaagagatagatgaaaataaaataaaaaatataaaaaataactttatagcaagaggtagtaatagagcaataactactataatgtggtatctgacattgttagcagtaaaatatgaatttaatgaaaatgcaataaagtttccactaattttagatagtccaaataatgttgaatctgacgagataaaggaagaatcattgtttaaatatatatttaaaaatactaaaacagatactcaattaatattatcatcgttagggttcaatgaaatgcaatttagtgaatttaagtttgataatataataaaacttgaaaatagcaaatataatttattaaataaagaggattattataataatatagatattttaaataaaatatttgaaaattag

SEQ ID NO: 92952 - DNA, 1065 bp, Peptoclostridium difficile DA00126; identical to SEQ ID NO: 92922

SEQ ID NO: 92953 - DNA, 1674 bp, Peptoclostridium difficile DA00126; identical to SEQ ID NO: 92923

SEQ ID NO: 92954 - DNA, 1065 bp, Peptoclostridium difficile DA00142; identical to SEQ ID NO: 92922

SEQ ID NO: 92955 - DNA, 1674 bp, Peptoclostridium difficile DA00142; identical to SEQ ID NO: 92923

SEQ ID NO: 92956 - DNA, 1029 bp, Peptoclostridium difficile DA00154; identical to SEQ ID NO: 92928

SEQ ID NO: 92957 - DNA, 1683 bp, Peptoclostridium difficile DA00154; identical to SEQ ID NO: 92915

SEQ ID NO: 92958 - DNA, 1029 bp, Peptoclostridium difficile DA00160; identical to SEQ ID NO: 92928

SEQ ID NO: 92959 - DNA, 1683 bp, Peptoclostridium difficile DA00160; identical to SEQ ID NO: 92915

SEQ ID NO: 92960 - DNA, 1014 bp, Peptoclostridium difficile DA00165
atgtctaagaatagatttagaaatgaactactttggggattgaaaaaaatgtatgagttatataagacgaatgaagattttgtagtagtttttgattatagatgtgatattgaagttaatttagaaaataaatttgaattttatcaagtgaaaactcaaaataattcaggtacatatacgataaataaacttactgataaaaaaaagggtagtaaatcagtagtagggaatttatatagcttgaaatatgatataaatatgaatgagattgatgatgtttatgttgcaattgtatcaaatgctcctttgaacgatggtaaaaaaacatataataattctcatgaagttaaaataaaaacaatagatagtagcgctatagaaaagataaagttaagtataaaaaatgacttaaatatagatgaagatataaatttagaaaatttattttttattagaattggtttagatttaattgaaccacaaaaaactttaattggtgaaactgctatattttttgaagatgtttttggaagggaatgtagtaaagtaaaatcattatacaatgtcttatatgaagagatatatagcaaatcagcatatgagttagatataaatacgtatgaaaatatagtatctaagaaaggtattaatagagataggatggatattatattaaaaagttatgctaataatacagataagtcagtagaactagcaaaatatagtataaatgaatggtgcaggaataatttctcacgtagattatctttgataaaatcattaactacaattgtatctaaattaagtgaaagtagtattttaaaggatatagaaaactgtatattgtcatatatatataataatatagataaattacaagtatcagataaagagttaattgaaattataagtgagatagtagaagaaaagaggcctatagaagttagcaagacagatatagaagctcttatcttactaacattaaaaaagtatgaggagggtgtttatgaatag

SEQ ID NO: 92961 - DNA, 1674 bp, Peptoclostridium difficile DA00165; identical to SEQ ID NO: 92923

SEQ ID NO: 92962 - DNA, 1029 bp, Peptoclostridium difficile DA00183; identical to SEQ ID NO: 92928

SEQ ID NO: 92963 - DNA, 1683 bp, Peptoclostridium difficile DA00183; identical to SEQ ID NO: 92915

SEQ ID NO: 92964 - DNA, 1065 bp, Peptoclostridium difficile DA00191; identical to SEQ ID NO: 92922

SEQ ID NO: 92965 - DNA, 1674 bp, Peptoclostridium difficile DA00191; identical to SEQ ID NO: 92923

SEQ ID NO: 92966 - DNA, 1029 bp, Peptoclostridium difficile DA00193; identical to SEQ ID NO: 92928

SEQ ID NO: 92967 - DNA, 1683 bp, Peptoclostridium difficile DA00193; identical to SEQ ID NO: 92915

SEQ ID NO: 92968 - DNA, 1014 bp, Peptoclostridium difficile DA00195; identical to SEQ ID NO: 92960

SEQ ID NO: 92969 - DNA, 1623 bp, Peptoclostridium difficile DA00195
atggcgaagaaaatagactttaaacatgggattaatatattaacatcagatgaaaagagtggtaatgacgtaggaaaatcagtactattgaaaagtatttatcacactttaggagcagatagtatatttgatcatatgtggaataaaattacaaaaacatatatattaaatgttactataaaaaataagacatactatgtatatagaagagataatttatttaaaatatataatacgaattttaaaaaaatatttatgacaaataaccgtgatgaattatctaattatttaagtgatttatatagttttaaggtaatgctgccaaaaagagaaaatgaagaattagagttagcacctcctgtatatagttatttgcttaactatatagatcaggatcatttagatggatctaaattttcatcttttaattcattgacacaatttcctaactataaggaaaatgtaatttatactcattttggactttttgatgaagagtactataaagctataaaggagttagaaatattaaaatcagaagaaaaaaataagaaaaaagaacgagaagttactttgaatatgctaaataaaataaaaagttacttaggaaacttagatgcaccagaaagtatagaagttttaaatatagaattaaataaaactaaagaagaatattcgaatatagttataaacttgcaaaaaataaaaaataatttaatgaaaataaggaatgaaaaagtagatttagaattaaacataaaagaaattgaattaacaagaaggaatgaaatgaagaagttaaaagttaaaaatgtgtgcccaagctgttcacatgaaatagaagatatagattctaaatttataataaataatcaaatagaagatcttattattcttaaagatgagttagagtcagaaattataaagtgcaatagagttatagaaaagaaagaggaagaatatcaatcactattagataaacttcatgagtatgagtcaaatatgaaaataaatgatgatagcatatctaatgtcttaaagcataaggcatatatagatactaaagatgatatagttttagatttagaaataatagataagaaaataaaagaaatacaacagacaatagagccatatgataaaaaaataaaagaatacaacagtcttaagaagaaggcaaatgctaagtatgaagagttaatgaaaaaggctaaaaaagactttggattagaagagatagatgaaaataaaataaaaaatataaaaaataactttatagcaagaggtagtaatagagcaataactactataatgtggtatctgacattgttagcagtaaaatatgaatttaatgaaaatgcaataaagtttccactaattttagatagtccaaataatgttgaatctgacgagataaaggaagaatcattgtttaaatatatatttaaaaatactaaaacagatactcaattaatattatcatcgttagggttcaatgaaatgcaatttagtgaatttaagtttgataatataataaaacttgaaaatagcaaatataatttattaaataaagaggattattataataatatagatattttaaataaaatatttgaaaattag

SEQ ID NO: 92970 - DNA, 1065 bp, Peptoclostridium difficile DA00197; identical to SEQ ID NO: 92922

SEQ ID NO: 92971 - DNA, 1674 bp, Peptoclostridium difficile DA00197; identical to SEQ ID NO: 92923

SEQ ID NO: 92972 - DNA, 1029 bp, Peptoclostridium difficile DA00203; identical to SEQ ID NO: 92928

SEQ ID NO: 92973 - DNA, 1683 bp, Peptoclostridium difficile DA00203; identical to SEQ ID NO: 92915

SEQ ID NO: 92974 - DNA, 1014 bp, Peptoclostridium difficile DA00211
atgtctaagaatagatttagaaatgaactactttggggattgaaaaaaatgtatgagttatataagacgaatgaagattttgtagtagtttttgattatagatgtgatattgaagttcatttagaaaataaatttgaattttatcaagtgaaaactcaaaataattcaggtacatatacgataaataaacttactgataaaaaaaagggtagtaaatcagtagtagggaatttatatagcttgaaatatgatataaatatgaatgagattgatgatgtttatgttgcaattgtatcaaatgctcctttgaacgatggtaaaaaaacatataataattctcatgaagttaaaataaaaacaatagatagtagcgctatagaaaagataaagttaagtataaaaaatgacttaaatatagatgaagatataaatttagaaaatttattttttattagaattggtttagatttaattgaaccacaaaaaactttaattggtgaaactgctatattttttgaagatgtttttggaagggaatgtagtaaagtaaaatcattatacaatgtcttatatgaagagatatatagcaaatcagcatatgagttagatataaatacgtatgaaaatatagtatctaagaaaggtattaatagagataggatggatattatattaaaaagttatgctaataatacagataagtcagtagaactagcaaaatatagtataaatgaatggtgcaggaataatttctcacgtagattatctttgataaaatcattaactacaattgtatctaaattaagtgaaagtagtattttaaaggatatagaaaactgtatattgtcatatatatataataatatagataaattacaagtatcagataaagagttaattgaaattataagtgagatagtagaagaaaagaggcctatagaagttagcaagacagatatagaagctcttatcttactaacattaaaaaagtatgaggagggtgtttatgaatag

SEQ ID NO: 92975 - DNA, 1623 bp, Peptoclostridium difficile DA00211; identical to SEQ ID NO: 92969

SEQ ID NO: 92976 - DNA, 1029 bp, Peptoclostridium difficile DA00310; identical to SEQ ID NO: 92928

SEQ ID NO: 92977 - DNA, 1683 bp, Peptoclostridium difficile DA00310; identical to SEQ ID NO: 92915

SEQ ID NO: 92978 - DNA, 1029 bp, Peptoclostridium difficile F249; identical to SEQ ID NO: 92928

SEQ ID NO: 92979 - DNA, 1683 bp, Peptoclostridium difficile F249; identical to SEQ ID NO: 92915

SEQ ID NO: 92980 - DNA, 1029 bp, Peptoclostridium difficile P2; identical to SEQ ID NO: 92928

SEQ ID NO: 92981 - DNA, 1683 bp, Peptoclostridium difficile P2; identical to SEQ ID NO: 92915

SEQ ID NO: 92982 - DNA, 1014 bp, Peptoclostridium difficile P5
atgtctaagaatagatttagaaatgaactactttggggattgaaaaaaatgtatgagttatataagacgaatgaagattttgtagtagtttttgattatagatgtgatattgaagttcatttagaaaataaatttgaattttatcaagtgaaaactcaaaataattcaggtacatatacgataaataaacttactgataaaaaaaagggtagtaaatcagtagtagggaatttatatagcttgaaatatgatataaatatgaatgagattgatgatgtttatgttgcaattgtatcaaatgctcctttgaacgatggtaaaaaaacatataataattctcatgaagttaaaataaaaacaatagatagtagcgctatagaaaagataaagttaagtataaaaaatgacttaaatatagatgaagatataaatttagaaaatttattttttattagaattggtttagatttaattgaaccacaaaaaactttaattggtgaaactgctatattttttgaagatgtttttggaagggaatgtagtaaagtaaaatcattatacaatgtcttatatgaagagatatatagcaaatcagcatatgagttagatataaatacgtatgaaaatatagtatctaagaaaggtattaatagagataggatggatattatattaaaaagttatgctaataatacagataagtcagtagaactagcaaaatatagtataaatgaatggtgcaagaataatttctcacgtagattatctttgataaaatcattaactacaattgtatctaaattaagtgaaagtagtattttaaaggatatagaaaactgtatattgtcatatatatataataatatagataaattacaagtatcagataaagagttaattgaaattataagtgagatagtagaagaaaagaggcctatagaagttagcaagacagatatagaagctcttatcttactaacattaaaaaagtatgaggagggtgtttatgaatag

SEQ ID NO: 92983 - DNA, 1674 bp, Peptoclostridium difficile P5; identical to SEQ ID NO: 92923

SEQ ID NO: 92984 - DNA, 1065 bp, Peptoclostridium difficile Y384; identical to SEQ ID NO: 92922

SEQ ID NO: 92985 - DNA, 1674 bp, Peptoclostridium difficile Y384; identical to SEQ ID NO: 92923

SEQ ID NO: 92986 - DNA, 1014 bp, Peptoclostridium difficile Y215; identical to SEQ ID NO: 92960

SEQ ID NO: 92987 - DNA, 1623 bp, Peptoclostridium difficile Y215; identical to SEQ ID NO: 92969

SEQ ID NO: 92988 - DNA, 1029 bp, Peptoclostridium difficile Y231; identical to SEQ ID NO: 92928

SEQ ID NO: 92989 - DNA, 1683 bp, Peptoclostridium difficile Y231; identical to SEQ ID NO: 92915

SEQ ID NO: 92990 - DNA, 1029 bp, Peptoclostridium difficile Y358; identical to SEQ ID NO: 92928

SEQ ID NO: 92991 - DNA, 1683 bp, Peptoclostridium difficile Y358; identical to SEQ ID NO: 92915

SEQ ID NO: 92992 - DNA, 1014 bp, Peptoclostridium difficile P7; identical to SEQ ID NO: 92982

SEQ ID NO: 92993 - DNA, 1689 bp, Peptoclostridium difficile P7
atgaggagggtgtttatgaatagtttgtttgtgaacagtctatatatatttgaatatgaaagtaaaatggcgaagaaaatagactttaaacatgggattaatatattaacatcagatgaaaagagtggtaatgacgtaggaaaatcagtactattgaaaagtatttatcacactttaggagcagatagtatatttgatcatatgtggaataaaattacaaaaacatatatattaaatgttactataaaaaataagacatactatgtatatagaagagataatttatttaaaatatataatacgaattttaaaaaaatatttatgacaaataaccgtgatgaattatctaattatttaagtgatttatatagttttaaggtaatgctgccaaaaagagaaaatgaagaattagagttagcacctcctgtatatagttatttgcttaactatatagatcaggatcatttagatggatctaaattttcatcttttaattcattgacacaatttcctaactataaggaaaatgtaatttatactcattttggactttttgatgaagagtactataaagctataaaggagttagaaatattaaaatcagaagaaaaaaataagaaaaaagaacgagaagttactttgaatatgctaaataaaataaaaagttacttaggaaacttagatgcaccagaaagtatagaagttttaaatatagaattaaataaaactaaagaagaatattcgaatatagttataaacttgcaaaaaataaaaaataatttaatgaaaataaggaatgaaaaagtagatttagaattaaacataaaagaaattgaattaacaagaaggaatgaaatgaagaagttaaaagttaaaaatgtgtgcccaagctgttcacatgaaatagaagatatagattctaaatttataataaataatcaaatagaagatcttattattcttaaagatgagttagagtcagaaattataaagtgcaatagagttatagaaaagaaagaggaagaatatcaatcactattagataaacttcatgagtatgagtcaaatatgaaaataaatgatgatagcatatctaatgtcttaaagcataaggcatatatagatactaaagatgatatagttttagatttagaaataatagataagaaaataaaagaaatacaacagacaatagagccatatgataaaaaaataaaagaatacaacagtcttaagaagaaggcaaatgctaagtatgaagagttaatgaaaaaggctaaaaaagactttggattagaagagatagatgaaaataaaataaaaaatataaaaaataactttatagcaagaggtagtaatagagcaataactactataatgtggtatctgacattgttagcagtaaaatatgaatttaatgaaaatgcaataaagtttccactaattttagatagtccaaataatgttgaatctgacgagataaaggaagaatcattgtttaaatatatatttaaaaatactaaaacagatactcaattaatattatcatcgttagggttcaatgaaatgcaatttagtgaatttaagtttgataatataataaaacttgaaaatagcaaatataatttattaaataaagaggattattataataatatagatattttaaataaaatatttgaaaattag

SEQ ID NO: 92994 - DNA, 1044 bp, Peptoclostridium difficile P13
atgaatttaccctatgatttatcaggatcaatgtctaagaatagatttagaaatgaactactttggggattgaaaaaaatgtatgagttatataagacgaatgaagattttgtagtagtttttgattatagatgtgatattgaagttcatttagaaaataaatttgaattttatcaagtgaaaactcaaaataattcaggtacatatacgataaataaacttactgataaaaaaaagggtagtaaatcagtagtagggaatttatatagcttgaaatatgatataaatatgaatgagattgatgatgtttatgttgcaattgtatcaaatgctcctttgaacgatggtaaaaaaacatataataattctcatgaagttaaaataaaaacaatagatagtagcgctatagaaaagataaagttaagtataaaaaatgacttaaatatagatgaagatataaatttagaaaatttattttttattagaattggtttagatttaattgaaccacaaaaaactttaattggtgaaactgctatattttttgaagatgtttttggaagggaatgtagtaaagtaaaatcattatacaatgtcttatatgaagagatatatagcaaatcagcatatgagttagatataaatacgtatgaaaatatagtatctaagaaaggtattaatagagataggatggatattatattaaaaagttatgctaataatacagataagtcagtagaactagcaaaatatagtataaatgaatggtgcaagaataatttctcacgtagattatctttgataaaatcattaactacaattgtatctaaattaagtgaaagtagtattttaaaggatatagaaaactgtatattgtcatatatatataataatatagataaattacaagtatcagataaagagttaattgaaattataagtgagatagtagaagaaaagaggcctatagaagttagcaagacagatatagaagctcttatcttactaacattaaaaaagtatgaggagggtgtttatgaatag

SEQ ID NO: 92995 - DNA, 1674 bp, Peptoclostridium difficile P13; identical to SEQ ID NO: 92923

SEQ ID NO: 92996 - DNA, 1029 bp, Peptoclostridium difficile P19; identical to SEQ ID NO: 92928

SEQ ID NO: 92997 - DNA, 1683 bp, Peptoclostridium difficile P19; identical to SEQ ID NO: 92915

SEQ ID NO: 92998 - DNA, 1029 bp, Peptoclostridium difficile P20; identical to SEQ ID NO: 92928

SEQ ID NO: 92999 - DNA, 1683 bp, Peptoclostridium difficile P20; identical to SEQ ID NO: 92915

SEQ ID NO: 93000 - DNA, 1014 bp, Peptoclostridium difficile P46; identical to SEQ ID NO: 92982

SEQ ID NO: 93001 - DNA, 1674 bp, Peptoclostridium difficile P46; identical to SEQ ID NO: 92923

SEQ ID NO: 93002 - DNA, 1065 bp, Peptoclostridium difficile P48; identical to SEQ ID NO: 92924

SEQ ID NO: 93003 - DNA, 1674 bp, Peptoclostridium difficile P48; identical to SEQ ID NO: 92923

SEQ ID NO: 93004 - DNA, 1065 bp, Peptoclostridium difficile P70; identical to SEQ ID NO: 92924

SEQ ID NO: 93005 - DNA, 1674 bp, Peptoclostridium difficile P70; identical to SEQ ID NO: 92923

SEQ ID NO: 93006 - DNA, 1029 bp, Peptoclostridium difficile P71; identical to SEQ ID NO: 92928

SEQ ID NO: 93007 - DNA, 1683 bp, Peptoclostridium difficile P71; identical to SEQ ID NO: 92915

SEQ ID NO: 93008 - DNA, 1044 bp, Peptoclostridium difficile P71
atgaatttaccctatgatttatcaggatcaatgtctaagaatagatttagaaatgaactactttggggattgaaaaaaatgtatgagttatataagacgaatgaagattttgtagtagtttttgattatagatgtgatattgaagttcatttagaaaataaatttgaattttatcaagtgaaaactcaaaataattcaggtacatatacgataaataaacttactgataaaaaaaaaggtagtaaatcagtagtagggaatttatatagcttgaaatatgatataaatatgaatgagattgatgatgtttatgttgcaattgtatcaaatgctcctttgaacgatggtaaaaaaacatataataattctcatgaagttaaaataaaaacaatagatagtagtgctatagaaaagataaagttaagtataaaaaatgacttaaatatagatgaagatataaatttagaaaatttattttttattagaattggtttagatttaattgaaccacaaaaaactttaattggtgaaactgctatattttttgaagatgtttttggaagggaatgtagtaaagtaaaatcattatacaatgtcttatatgaagagatatatagcaaatcagcatatgagttagatataaatacgtatgaaaatatagtatctaagaaaggtattaatagagataggatggatattatattaaaaagttatgctaataatacagataagtcagtagaactagcaaaatatagtataaatgaatggtacaagaataatttctcacgtagattatctttgataaaatcattaactacaattgtatctaaattaagtgaaagtagtattttaaaggatatagaaaactgtatattgtcatatatatataataatatagataaattacaagtatcagataaagagttaattgaaattataagtgagatagtagaagaaaagaggcctatagaagttagcaagacagatatagaagctcttatcttactaacattaaaaaagtatgaggagggtgtttatgaatag

SEQ ID NO: 93009 - DNA, 1674 bp, Peptoclostridium difficile P71; identical to SEQ ID NO: 92917

SEQ ID NO: 93010 - DNA, 1065 bp, Peptoclostridium difficile P73; identical to SEQ ID NO: 92924

SEQ ID NO: 93011 - DNA, 1674 bp, Peptoclostridium difficile P73; identical to SEQ ID NO: 92923

SEQ ID NO: 93012 - DNA, 1029 bp, Peptoclostridium difficile P74; identical to SEQ ID NO: 92928

SEQ ID NO: 93013 - DNA, 1683 bp, Peptoclostridium difficile P74; identical to SEQ ID NO: 92915

SEQ ID NO: 93014 - DNA, 1065 bp, Peptoclostridium difficile P74; identical to SEQ ID NO: 92916

SEQ ID NO: 93015 - DNA, 1674 bp, Peptoclostridium difficile P74; identical to SEQ ID NO: 92917

SEQ ID NO: 93016 - DNA, 1065 bp, Peptoclostridium difficile P75; identical to SEQ ID NO: 92924

SEQ ID NO: 93017 - DNA, 1674 bp, Peptoclostridium difficile P75; identical to SEQ ID NO: 92923

SEQ ID NO: 93018 - DNA, 1065 bp, Peptoclostridium difficile F601; identical to SEQ ID NO: 92922

SEQ ID NO: 93019 - DNA, 1674 bp, Peptoclostridium difficile F601; identical to SEQ ID NO: 92923

SEQ ID NO: 93020 - DNA, 1065 bp, Peptoclostridium difficile P37; identical to SEQ ID NO: 92924

SEQ ID NO: 93021 - DNA, 1674 bp, Peptoclostridium difficile P37; identical to SEQ ID NO: 92923

SEQ ID NO: 93022 - DNA, 1014 bp, Peptoclostridium difficile P68; identical to SEQ ID NO: 92982

SEQ ID NO: 93023 - DNA, 1674 bp, Peptoclostridium difficile P68; identical to SEQ ID NO: 92923

SEQ ID NO: 93024 - DNA, 1065 bp, Peptoclostridium difficile E13; identical to SEQ ID NO: 92916

SEQ ID NO: 93025 - DNA, 1674 bp, Peptoclostridium difficile E13; identical to SEQ ID NO: 92917

SEQ ID NO: 93026 - DNA, 1029 bp, Peptoclostridium difficile E13; identical to SEQ ID NO: 92928

SEQ ID NO: 93027 - DNA, 1683 bp, Peptoclostridium difficile E13; identical to SEQ ID NO: 92915

SEQ ID NO: 93028 - DNA, 1029 bp, Peptoclostridium difficile E7; identical to SEQ ID NO: 92928

SEQ ID NO: 93029 - DNA, 1683 bp, Peptoclostridium difficile E7; identical to SEQ ID NO: 92915

SEQ ID NO: 93030 - DNA, 1107 bp, Clostridium pasteurianum NRRL B-598
ttgagtaaggcaaaggtttatgaaacattaccttatgatttatctggttctagatcaaaaaatagatttagaaatgaacttatgtggggattggaaaaattatatgaaatttatagaactggagaagatttttgtataatttttgattatgtttgcgatatagaaattcattttataaatagattcgaattttatcagataaagactagtaataaaggtgaagcttatactatcggtaaaatttcaaatccagataaacagggcaattcaatactaggaaaagtatatattttaaaaaatattattgatgcttcaaaactattggatgcaacaataattgctatagttgttaatgttccattaaagactttagatgatactgttcattcatcggttaaaaagttaaacttaaatgatataaaagatacaaaggaagctaaaagagtagctgatagaaataatggagatatagaaaatcaaagtaaaaataaaattgtagaaaatttaaaattagaaataaagacagatactattgatttgtcaaacgcatattatattaatagttcattagatctaattaatccagataacactttattaggaattacattgaaatttattgaggaaattacagggaaagaagcttcgagggcaagcacattatatagaacattgaaagatgtaataactgataaagcgtgctatgagctaaagtgtgaaacttatcctgaagttgaaaagtataaaggtataaccaaaacagagtttgaatttatattggacagatgtattagcatttctgaagattatgtaaaggaagcaaaatatattattgagaataactatcatggattttcagaaaaaataaagttgattaaaggactatcctttatagttactgaattaaatggaaatgtaatattaaataatttaaaagaaaaaataatgaattacataaatgataatattgatgagttaaatgatgcggttcgagaaactattgatagcatttctcaagtatttaataaagagtttcctatagaatactcgtcacatgaaagaatagcattagtcattttgatggtagcaaaatataaggaggattaa

SEQ ID NO: 93031 - DNA, 1680 bp, Clostridium pasteurianum NRRL B-598
atgagtagtttaataattaataaattatatattttttcgccacatgaaaaaaaatctaaaactgtagattttaaggctggaaaaaacattattacttcaagtcaaaaaaatggtagtaagcgtggaaaatcaacattgactaaaagtatatattatgctttaggagcagactgtttttttgatgatgaatggaacataaatgataagatttatatagtagattttactatatcaaatacatcttattatatttttagatgggataggttgtttaaagtttatagtaaagataactttaaagagctttttaagactaatcttagaaatgaattagcgaagtatttaaaaactatatttaaattttcggtcgaacttcccaataaagaaacagagaatttagaagttacacctccagcatttaattacttattaaattatattgatcaagataaaatagatggaacgaattttaattctttcaaaaatctttcacaatattctgattataaagaaaatgttttatattatcactttaatgtttataatgaagagtactataattctataaaaagtatagaaaaattatcagataaaaagaaagaattacaaaatagagttaaacttaataaaggtatgatagataagataaataaaaatactaacaatattgattattctgttgatattgataacttgattatcgagctggatgactctaaagctgaatatagaaaaataattgacattttaaatagaataaaaaagggtcttattaagttgagaaatgaaaaagaagatcttttggtagagttaaaagatttagagatttttaataaaaactgcgagaaaaatgttaaacaattaaataggcataaatgtccacattgtaattcagaaattcaagatacattagatgaaaaaattaagagatacaatgagatagatgatatattgtatttaaaatatgaaattgaagatagcatattaaagattgaaaggaaaatagagttagaggagaaaaaatataaggatgagttagtaaatttaaatgaatatgaaagcagattgaaaattaattctaaagatataaatgacattataaaatataaaggatttatagaaattaaaaattctctatattcagagattgaaatagataatgccgaaattactgaaatagatgaatctatcaaaaatttaaatcgcataaaatcttcatatgccgttaagaagtctagtgttaataaaagatatagtgagctgatgaaaaaggataaagaatattttggattaaaagaaataaacgaaaataatttttcaaatattaagaatgtatttactgctggtggcagtaataagccaattgtcacaattatgtggtacatgaatttattaaaacttaaagctgaatttaatagtgaggcaattaagttcccgttaattttagatagcccaaataacgttgaatctgatgatgataaaaagaaaactttattcaattatctatttaaagagattcaaccaaatactcagttaatcatttctacgctaggatttaaacaaagtgactataaggaatttaagtttgagaatattgtagagttaacaaatgataagtataaaatgttaagtgcagatgaatataataaatataaagaatttttaaataaatttatttaa

SEQ ID NO: 93032 - DNA, 1092 bp, Clostridium sordellii VPI 9048
atggataatgctgaagcttatatgagattaccacatgatttatctggagctagatcaaaaggtagatttgattatgaacttctttgggggttaaaaaaaatgataagcctctttatcgaagataagaaatttatagcagtttttgatcaagcttgtgatgtagaatttcactttgatggaaaatatgaattttatcaagttaaaactgatataaaaagtggggcatatactatagataaacttactaaaaaagaaaaaaagaaaaagaattctattttgggaaatttatgcttacttaaatatgtagattcaattgaaaataaaaatacaaaactttatatagtttctaacactcctttaaaggataactcgaataaattatattctgattgttatatgatatctttgaatagtatttgtgaagactctgtcgacacaataaaagcacgaatgaaaagtgaacttgatttgactgaaataaatttaaaagatatatactttataagagaacatatgaatttaattgatcctgaggccgaaattagaggagagcttacaaaattatttgaagataaactaaagtgcgattatagggatataggggtgctttataaaatattaaaatctgatattttaaaaaaaggaaagtatgagttaaagtcatcgaattatgaaagtgttattaaaaataaaggtttttcatatgagcaattagaatacataataaatcaatataaaaaaacagatagtggatatataggttctgcaaaagaatatattaataatagctatagttcaactataggagaacgtatcaagtataataaagcttggcgtagtgttttatctatgttagtaaagagtaaagatttacaattacttgaaaaggatatatatggatacttaaaaagcaacttagttgtaattggtgagttatcggacaaagaattaatagaaagaataagagaagaattctataaaaagaaacttatagaaatggatgatacagagttcttagtgtttttgattattataattaagaaaagtgaagaacaaatatttaaagagttagaggtgagtgagtatgagtag

SEQ ID NO: 93033 - DNA, 1644 bp, Clostridium sordellii VPI 9048
atgagtagtttatttgttaagaacttatatatatttgaatgtactaataaacttgctaaaaaagttgaatttaaatatggaattaatataattacatctgatagtgaaaaaggaaacagtgttgggaagtcatcaattttaagaagtatttatcatactcttggagcagatggggaatttaatagtgagtgggcaagtactagcaaaacgtacctgttagaatttgaaatagataacaatacatattatatatatagaagggattcattatttaaaatatttgataaagactttaacagactatattctacgattaatagatctgaattatcttggtatttgagtaatatttttgattttaaagtaatgctaaaaaatagggaagatgaattagagatagcaccaccggcatatagttatttgttgaactatatagatcaagataaaatgaatggagcagacttttgctcgtttaaatcattaactcagtttccttattttagatcaactttattatatacacactttggaatttataatgatgaatattataaagctcaatcagatattgtaactttgaaatctgaaataaaaagatgtgagtcagaaaaaaaattagtaaatttgctgaaagaaaaattaaatgcgtatttaaaaggatataatgccccaaataatattgaaatattaaatattgaattagatgaaaatgataatgagtatgaaaaaataattacaaaactacaaaaaacaaaaaatttattaatcaatttaagaaatactagattagagttaaaggaaagtattaaagaaattgaagatttagaaaaagattggaatcaaaaattacttgatactgatatagatataaatgaaaagatagaaaaaacgatgactcttgaagaattaataatagaaaaagatgagattgattcagaaatattacgatgtgatagaaaaatagaaagttgtgaggaagactataagaaaatattagagtctttgaaaagatatgaaaataaattaaaattaaatgaatcacatgttgatgatatattgaagtataaaggttatcagaatacaagaaatgaattaattatagaatttgctgagttaagtaatgtagtagatagatgcaaagaaaaaattaaagaaagtaaaagtataataaattcatataataataaaaaatcaaaaattaaaaaaagatattatgaattaatgaagaattctaaagagtattttgatataaaagaagtacataatgatagctttaagtcaattgatacaaaatttagaggagaagggggaaatctacctgccagtacagtattttggcatgttaacttattaaaattaaagtatgaatttaatagagactcaataaggtttcctcttataatagatagccctaataatagggagattgaaggaaataaaaaagttttaatatttaaatatatttttgaaaataatatttcagatactcagattatagtgtcttcactagggtttgataaatctaaatttaaagatgttaaatttgataatctcattgaacttaacaatgaaaaatataatttattaaatagacatgattatgaagaaaataaacacattttaaaaatgataattgaaaattaa

SEQ ID NO: 93034 - DNA, 1092 bp, Clostridium sordellii; identical to SEQ ID NO: 93032

SEQ ID NO: 93035 - DNA, 1644 bp, Clostridium sordellii; identical to SEQ ID NO: 93033

SEQ ID NO: 93036 - DNA, 1065 bp, Clostridium sordellii 8483; identical to SEQ ID NO: 92924

SEQ ID NO: 93037 - DNA, 1674 bp, Clostridium sordellii 8483; identical to SEQ ID NO: 92923

SEQ ID NO: 93038 - DNA, 1140 bp, Clostridium tyrobutyricum DIVETGP
atggtagctaaaacatcagcacagtccacctcgcctggcagttctaaggtagtatcaaaaaataagaaaataaaagatatagcggttgatactagttctggtagtatggcgtataatcgctttgagatgcaagtaagccagactcttcacatggcaattgaactttttgatagcttggattacttattagtattggattattatgatgatattgctttgtttgatgatgaaaagaaaccggaagtagtaagctattatcagatgaaaaccaatgaagaatcaattagtattagtacagcgatttcagaagattggttagttaaaatgtatgcacagttggagcatcccgagtggttagtaaaggaacttggacttataactaattgtccattaaaagtgactgttaagattaatggagctgatggtaaaaacaaaaaccaaacaaaaacatatacagctgaaaaaacgccttttagcaaattcaatcctattacaattgataaaataaagcatgatattgcacagaaaaaaggaattagccctgaagatgttgatttgactaaatttgttcacatacggacaacactttctattcctaaacatcatgaaattgttgagcaggagttgggtgacttcttacataaaaaatatccgcgtattacaatggatgtagttaagacaattttcggagctatgttggacattctcacaaagagacaacaatatgagttactagcagagaatgcactttataatgaagtgcgtgaaaaaaaaggtattacaaagtgtgatttttctcgtgtaattgaagaagcaattgtgatatctattccgccatttgatgaaatacagagggttgcaggtttatcagatgatgataaatacaaagcatcatttgagtatacaaaaataatgagtgattctcagtcaaaaatagaatctttttcaaacatatttattaagattaggaaactgtgttctaattatcggaaaaattcggatgaatgtgtatggcaatatgtcaatagattgtgtgatcgactgtacaaagataactttattatagaatcaatatataatcgtatgtatatttgtatcttaacgatctgtattttgattaatgaaatgaggcgggtataa

SEQ ID NO: 93039 - DNA, 1686 bp, Clostridium tyrobutyricum DIVETGP
atgaatgaaatgtattttaaaaatattttaatttctgatatacaggcacaaactgctcgttttcaggagttttctaaaggattcaatgtaattactagtcatgataatcatgtcggaaaatcatccctgttgaaatcaatttattatacacttggaacagaggtggactatgatcctgtttgggacaagagaacaaaactatatgctgttacgatttgcgtgaatggtattgattacagagttgcgagatttcaaaagagttttgcagtttttaaaggaacagaacttgtattgctgactcggagtgttactcatggtttggcaaaaaaatatgaagagctgttttcttttgcagtttaccttcccaataaaaatacgaaaaaaatagagatggcgccaccagctttttcttttatgccatattatatagatcaagataagggttggagcggattatataatagttttgcaagtattgatcaatataagcaaaatgacagaattaaatctttatattaccatttgaatatctacactaaatatactgtggagctgatggcacaaagagatcaaataaaagatgaaattgaaaagttaaaaaaagaggaagaacgtattcgtattacactagaatctctttctcaagaaacacaaaatttgcttccagcagaaacattagaagacttggaacgtaatttacaaatacctaaagaacagatagcaaaactggtaaaaaaagcaggtgaagttagaaacaaaattcagtcgttggaaataacttttaatcaacacgagcatcagttacaggtaataaaggagtataagaatataaagactgatgtaggcaatactgatcggaaaatattgcatacttgtcctcaatgcggttatacctttgatgaagaaatttataaaattgttcgttcaaattacaatattcagaacgaggattatatgtgtcaacaaattcagctgattattgattccattgtagaagaacttgataggcataaaaatcagtatgttgaattgatggcggccttggaagaacaggagaatgtttttgatgaatcacaggatgcttacaaagtgtatgttaggcaacgtggattaaaagattcactaactcactttagtcaacagttgagttataattcgttgaaacagtctgaatatactgatgcaataaagaatattaacaaggaacttcgaaaattgcctaataaaaaggaagtggaagaaaaatatattgaatatgtacgcttaaatattattagtttagatgcatggaatgctgcttatgatggtaatatcaaattgcttaagcctatgaaggcacaaggtactttagagaacaaaataatactggcacagtttgttggattgttccagacaatggaatactttaagagcagtgctattcgatttccatttgtagtagattcgcctagagctaaagaagctagcaacagcagtagtaaagatattctgaaacttatttctgaagttgatatgctaccccaagttattttggcaacaatggactattcagattttggatctgagatatcacataaagcaaaaattacaattctcactgagaaacgtaaacttttaaataaagagaattatgaaagtcataaggattttataaatcaactatttgaacttttgaagaatgtatga

SEQ ID NO: 93040 - DNA, 1083 bp, Listeria monocytogenes J1816; identical to SEQ ID NO: 92888

SEQ ID NO: 93041 - DNA, 1695 bp, Listeria monocytogenes J1816; identical to SEQ ID NO: 92889

SEQ ID NO: 93042 - DNA, 1083 bp, Listeria monocytogenes str. Scott A; identical to SEQ ID NO: 92888

SEQ ID NO: 93043 - DNA, 1695 bp, Listeria monocytogenes str. Scott A; identical to SEQ ID NO: 92889

SEQ ID NO: 93044 - DNA, 1083 bp, Listeria monocytogenes ATCC 19117; identical to SEQ ID NO: 92888

SEQ ID NO: 93045 - DNA, 1695 bp, Listeria monocytogenes ATCC 19117; identical to SEQ ID NO: 92889

SEQ ID NO: 93046 - DNA, 1083 bp, Listeria monocytogenes SLCC2378; identical to SEQ ID NO: 92892

SEQ ID NO: 93047 - DNA, 1695 bp, Listeria monocytogenes SLCC2378
atgaatactctgacatttaataaattatatattttttcaacatttgaaaataaagcgaagtatattgaattttctaatggaaaaaacatcattactacagaagatgatgttattggaaataagaaaggtaagtctacaattcttaaaaatttatattatactatgggagcagactgctattttgaagataagtgggatgtccaaaaaaagatatccgttttagaattttcagttaacaagacatcatatattatctttaggcaggataagctgtttaaaatttttgatttaaagaaaaatctattatttaagactctcaagagaaaagaattatcaactttcttagaaaaaatatttaagtttactgtaaaattacctaatcgtcacacagacaaattagagattgcaccgccagcttatttttatctcttaaattatacagatcaggataaaatgaatggaagttcatttgattcattcagaaatcttggtgaatattctaatttcaaattaaatacactttactcccattttggtattttagatgatagatactatgaagttatgaagctagttgaacagttaagtgagcaaattaaagctcttgatgatgaatgccagctattttataagatgcttgaaaaaattgaaaacgaacttgttgataaagttagctttcctaccaattttgatgttttacaacaagaagttgatagcacgaaaaaccaatatgaaaaaattgttcattcattgcagcttactaaaaatagattaattaatcaacgaaatgataattatgaggttaagcaagaactagccaatttaaggaagataattagaaaaaatgataaagacaaaaagacgataaacagtcatacttgtcccaagtgtcactccattattactgataatcttgaattgaaaatcaatactttaaacaatgaagaggactttttgttcttagctaacgaacttgaaaaagaatctttgaaagtagaggctaatatctataaagaagaaaaaaaatatcagcaattattagatactctaaaaaaatatgaagataaattagcattaagttcaaaagaaattagtaatgttttgaagcataaaggattaatggaagtcagagataagctgattatggatattgggaacagtcaggtcaatttgaaacaggctcaggaatcgttaaaagaacagagaaaaattttgaaagaatatttagaattgaaaaagcaaataaatgaaacttattatgaattaatgttgaatgataaaattcattttaacttagaagaactggactctgataaatttaaaaaaattgattctaatataagcgcaggcggaagtaataaaccaataaatactattgtctggtattttaatcttttgaaagtgaaaaataaatttaatccggatgctatacgtttaccaattgttttagatagccctgcaaatgcagaacttgatagagatagtaaacataccttgttaaagtatatatttgaagaatcagataaagatagtcaattaatagtttctactataggattttcaacttctgactttaaagaagaacattttgataatgttatcgaactttcaaattctaaatatgagttattgaatacagaagattatgagctttataaagaactgtgtaaggatttagttttaataaacgaatag

SEQ ID NO: 93048 - DNA, 948 bp, Listeria monocytogenes
atggtatttgactatgcatgtgatatcgaagtacacaaagatactggctttgatttttatcaagttaaatctaaaaaagacggagcagtttatactcaaggagcattactaaaaaagaaaaaacttgaagaagaagaaaagagtttttctattctaggtaggctttatgcccttgcaaataatcaaaataagaatattcatgtaaatttagtttctaataaaccatttcaagactctagtaaaaaaaatcatacaacaattgaaaacttggatttcaataatctagatgaggaagtgcaaaaaacgatagaatctaaacttcaagaggagctaggttcggacgttacacctgatatgtcaaaaattagttttatttatacttcgattgaccttttcagtcctgatgatacattgagaggaaagactagcaaatttttctttgaattaacaggaagtgagccaaacaaaccgaatgctctctataatttacttgttgaaacgatttctgaaaaagcttgttatgaattgcaattaaattgctattcagacatattaaatagaaaaggtgtttcaaaagatgatattgaaaaaataatttcactttattctgaaaaaactgatagagcagtagaaaaggcttcaatatttatagacaccaacataaacaaaccaataaaaagattgaaaatgaaaacgatgcttggtaaagtggtttccgatattgagagtggcaatagattagttttacagaatgaagagcttattgttcaatctatcttttcaaacttggagaaatatgatgttgaagagactgttttcattgatttgttagtttctgagtattcaaaacttttcactattgagtattcagaagactacagatatgccttttttttactaatcttaatgaaagtcgaggaaaatatttatgaatactctgacatttaa

SEQ ID NO: 93049 - DNA, 1695 bp, Listeria monocytogenes; identical to SEQ ID NO: 93047

SEQ ID NO: 93050 - DNA, 1083 bp, Listeria monocytogenes WSLC1042; identical to SEQ ID NO: 92892

SEQ ID NO: 93051 - DNA, 1695 bp, Listeria monocytogenes WSLC1042; identical to SEQ ID NO: 93047

SEQ ID NO: 93052 - DNA, 1083 bp, Listeria monocytogenes Lm_1824; identical to SEQ ID NO: 92888

SEQ ID NO: 93053 - DNA, 1695 bp, Listeria monocytogenes Lm_1824; identical to SEQ ID NO: 92889

SEQ ID NO: 93054 - DNA, 1083 bp, Listeria monocytogenes; identical to SEQ ID NO: 92888

SEQ ID NO: 93055 - DNA, 1695 bp, Listeria monocytogenes; identical to SEQ ID NO: 92889

SEQ ID NO: 93056 - DNA, 1083 bp, Listeria monocytogenes; identical to SEQ ID NO: 92888

SEQ ID NO: 93057 - DNA, 1695 bp, Listeria monocytogenes; identical to SEQ ID NO: 92889

SEQ ID NO: 93058 - DNA, 1083 bp, Listeria monocytogenes; identical to SEQ ID NO: 92888

SEQ ID NO: 93059 - DNA, 1695 bp, Listeria monocytogenes; identical to SEQ ID NO: 92889

SEQ ID NO: 93060 - DNA, 1083 bp, Listeria monocytogenes; identical to SEQ ID NO: 92888

SEQ ID NO: 93061 - DNA, 442 bp, Listeria monocytogenes
atgaatactctgacatttaataaattatatattttttcaacatttgaaaataaagcgaagtatattgaattttctaatggaaaaaacatcattactacagaagatgatgttattggaaataagaaaggtaagtctacaattcttaaaaatttatattatactatgggagcagactgctattttgaagataagtgggatgtccaaaaaaagatatccgttttagaattttcagttaacaagacatcatatattatctttaggcaggataagctgtttaaaatttttgatttaaagaaaaatctattatttaagactctcaagagaaaagaattatcaactttcttagaaaaaatatttaagtttactgtaaaattacctaatcgtcacacagacaaattagagattgcaccgccagcttatttttatctcttaaattatacag

SEQ ID NO: 93062 - DNA, 1083 bp, Listeria monocytogenes; identical to SEQ ID NO: 92888

SEQ ID NO: 93063 - DNA, 1695 bp, Listeria monocytogenes; identical to SEQ ID NO: 92889

SEQ ID NO: 93064 - DNA, 1083 bp, Listeria monocytogenes; identical to SEQ ID NO: 92888

SEQ ID NO: 93065 - DNA, 1695 bp, Listeria monocytogenes; identical to SEQ ID NO: 92889

SEQ ID NO: 93066 - DNA, 1083 bp, Listeria monocytogenes; identical to SEQ ID NO: 92888

SEQ ID NO: 93067 - DNA, 1695 bp, Listeria monocytogenes; identical to SEQ ID NO: 92889

SEQ ID NO: 93068 - DNA, 1083 bp, Listeria monocytogenes; identical to SEQ ID NO: 92888

SEQ ID NO: 93069 - DNA, 1695 bp, Listeria monocytogenes; identical to SEQ ID NO: 92889

SEQ ID NO: 93070 - DNA, 1083 bp, Listeria monocytogenes; identical to SEQ ID NO: 92888

SEQ ID NO: 93071 - DNA, 1695 bp, Listeria monocytogenes; identical to SEQ ID NO: 92889

SEQ ID NO: 93072 - DNA, 1083 bp, Listeria monocytogenes; identical to SEQ ID NO: 92888

SEQ ID NO: 93073 - DNA, 1695 bp, Listeria monocytogenes; identical to SEQ ID NO: 92889

SEQ ID NO: 93074 - DNA, 1083 bp, Listeria monocytogenes; identical to SEQ ID NO: 92888

SEQ ID NO: 93075 - DNA, 1695 bp, Listeria monocytogenes; identical to SEQ ID NO: 92889

SEQ ID NO: 93076 - DNA, 1083 bp, Listeria monocytogenes; identical to SEQ ID NO: 92888

SEQ ID NO: 93077 - DNA, 1695 bp, Listeria monocytogenes; identical to SEQ ID NO: 92889

SEQ ID NO: 93078 - DNA, 1083 bp, Listeria monocytogenes; identical to SEQ ID NO: 92888

SEQ ID NO: 93079 - DNA, 1695 bp, Listeria monocytogenes; identical to SEQ ID NO: 92889

SEQ ID NO: 93080 - DNA, 1083 bp, Listeria monocytogenes; identical to SEQ ID NO: 92888

SEQ ID NO: 93081 - DNA, 1695 bp, Listeria monocytogenes; identical to SEQ ID NO: 92889

SEQ ID NO: 93082 - DNA, 1083 bp, Listeria monocytogenes; identical to SEQ ID NO: 92888

SEQ ID NO: 93083 - DNA, 1695 bp, Listeria monocytogenes; identical to SEQ ID NO: 92889

SEQ ID NO: 93084 - DNA, 1083 bp, Listeria monocytogenes; identical to SEQ ID NO: 92888

SEQ ID NO: 93085 - DNA, 1695 bp, Listeria monocytogenes; identical to SEQ ID NO: 92889

SEQ ID NO: 93086 - DNA, 1083 bp, Listeria monocytogenes; identical to SEQ ID NO: 92888

SEQ ID NO: 93087 - DNA, 1695 bp, Listeria monocytogenes; identical to SEQ ID NO: 92889

SEQ ID NO: 93088 - DNA, 1083 bp, Listeria monocytogenes; identical to SEQ ID NO: 92888

SEQ ID NO: 93089 - DNA, 1695 bp, Listeria monocytogenes; identical to SEQ ID NO: 92889

SEQ ID NO: 93090 - DNA, 1083 bp, Listeria monocytogenes; identical to SEQ ID NO: 92888

SEQ ID NO: 93091 - DNA, 1695 bp, Listeria monocytogenes; identical to SEQ ID NO: 92889

SEQ ID NO: 93092 - DNA, 1083 bp, Listeria monocytogenes; identical to SEQ ID NO: 92888

SEQ ID NO: 93093 - DNA, 1695 bp, Listeria monocytogenes; identical to SEQ ID NO: 92889

SEQ ID NO: 93094 - DNA, 1083 bp, Listeria monocytogenes; identical to SEQ ID NO: 92888

SEQ ID NO: 93095 - DNA, 1695 bp, Listeria monocytogenes; identical to SEQ ID NO: 92889

SEQ ID NO: 93096 - DNA, 1083 bp, Listeria monocytogenes; identical to SEQ ID NO: 92888

SEQ ID NO: 93097 - DNA, 1695 bp, Listeria monocytogenes; identical to SEQ ID NO: 92889

SEQ ID NO: 93098 - DNA, 1083 bp, Listeria monocytogenes; identical to SEQ ID NO: 92888

SEQ ID NO: 93099 - DNA, 1695 bp, Listeria monocytogenes; identical to SEQ ID NO: 92889

SEQ ID NO: 93100 - DNA, 1083 bp, Listeria monocytogenes; identical to SEQ ID NO: 92888

SEQ ID NO: 93101 - DNA, 1695 bp, Listeria monocytogenes; identical to SEQ ID NO: 92889

SEQ ID NO: 93102 - DNA, 1083 bp, Listeria monocytogenes; identical to SEQ ID NO: 92888

SEQ ID NO: 93103 - DNA, 1695 bp, Listeria monocytogenes; identical to SEQ ID NO: 92889

SEQ ID NO: 93104 - DNA, 1083 bp, Listeria monocytogenes; identical to SEQ ID NO: 92888

SEQ ID NO: 93105 - DNA, 1695 bp, Listeria monocytogenes; identical to SEQ ID NO: 92889

SEQ ID NO: 93106 - DNA, 1083 bp, Listeria monocytogenes; identical to SEQ ID NO: 92888

SEQ ID NO: 93107 - DNA, 1695 bp, Listeria monocytogenes; identical to SEQ ID NO: 92889

SEQ ID NO: 93108 - DNA, 1083 bp, Listeria monocytogenes; identical to SEQ ID NO: 92888

SEQ ID NO: 93109 - DNA, 1695 bp, Listeria monocytogenes; identical to SEQ ID NO: 92889

SEQ ID NO: 93110 - DNA, 1083 bp, Listeria monocytogenes; identical to SEQ ID NO: 92888

SEQ ID NO: 93111 - DNA, 1695 bp, Listeria monocytogenes; identical to SEQ ID NO: 92889

SEQ ID NO: 93112 - DNA, 1083 bp, Listeria monocytogenes; identical to SEQ ID NO: 92888

SEQ ID NO: 93113 - DNA, 1695 bp, Listeria monocytogenes; identical to SEQ ID NO: 92889

SEQ ID NO: 93114 - DNA, 1083 bp, Listeria monocytogenes
ttgtcaaatgaagctatatatatgaaattgccctttgatttgtctggctctcgaagtaagaatagatttagatacgagatactatggggtctaagtaaattatttgatatatataatgagaatgagtcatttgttatggtatttgactatgcatgtgatatcgaagttcataaagatactggcttagatttttatcaagttaaatctaaaaaagacggagcagtttatactcaaggagcattactaaaaaagaaaaaacttgaagaggaagaaaagagtttttctattctaggtaggctttattcccttgcaaataatcaaaatgagaatattcacgtaaatttagtttccaataaaccatttcaagactctagtaaaaaaaatcatacaacaattgaaaacttggattttaataatctagatgaggaagtgaaaaaaacaatagaatctaaacttcaagaggagctaggttcggatgttacacctgatatgtcaaaaattagttttatttatacttcgattgaccttttcagtcctgatgatacactgagaggaaagaccagtaaatttttctttgaattaacaggaagtgagccaaacaaacctaatgcactctataatttacttgtcgaaacaatttctgaaaaagcttgttatgaattgcaattagattgctattcagacatattgaatagaaaaggtgtttcaaaagatgatattgaaaaaataatttcactttattctgaaaaaactgatagagcagtagaaaaggcttcagtatttatagacaccaacataaacaaaccaataaaaaggttgaaaatgaaaacgatgcttggtaaagtggtttccgatattgagagtggtaatagattagttttacagaatgaagagcttattgttcaatctatcttttcaaacttggagaaatatgatgttgaagagactgttttcattgatttgttagtttctgagtattcaaaacttttcactattgagtattcagaagactacagatatgccttttttttattaatcttaatgaaagtcgaggaaaatatttatgaatactctgacatttaa

SEQ ID NO: 93115 - DNA, 1695 bp, Listeria monocytogenes
atgaatactctgacatttaataaattatatattttttcaacatttgaaaataaagcgaagtatattgaatttactaatggaaaaaacatcattactacggaagatgatattattggaaataaaaaaggtaagtcaacaattcttaaaaatttatattatactatgggagcagactgctattttgaagataaatgggatgtccaaaagaagatatccattttagaattttcagttaacaaggcatcatatattatctttaggcaagataagttgtttaaaatttttgatctaaagaaaaatctattatttaaaactcttaagagaaaagaactatcaactttcttagaaaaaatttttaagtttactgtaaaattacctaatcgttatacagacaaattggagattgcaccgccagcttatttctatctcttaaattatatagatcaggataaaatgaatggaagttcgtttgattcatttagaaaccttggtgaatattctaatttcaagttaaatacactgtactctcattttggtattttagatgatagatactatgaagttatgaaattagttgaacaattaagtgagcaacttaaagttcttgatgaagaatgccagctgttttacaagatgcttgaaaaaattgaaaatgaacttgttgataaagttagctttcctacaaattttgatgttttacaacaagaagttgaaagtacaaaaaatcaatatgaaaaaattgtacattcattgcaacttactaaaaatagattaattaatcaaagaaacgataattatgaggttaaacaagaactagccaatttaagaaaaataattagaaaaaatgataaagataaaaaggtaataaatagtcacacttgtcctaaatgtcactccattattactgacaatcttgaattgaaaatcaatactttaaacaatgaagaggactttttgttcctagctaatgaacttgaaaaagaatctttgaatgtagaagctaacatatacaaagaagaaaaaaattatcagcgattattagatactctaaaaaactatgaagataaattagaattaaattcaaaagaaatcagtagtgttctgaaacataaaggattaatggaagtaagagataagctgattatggatattgggaacagtcaggttaatttgaaacaggctcagggatcgttaaaagagcagagaaaaattttgaaagaatatttagagttgaaaaagcaaataaatgaaacttattatgaattaatgctgaatgataaaattcattttaacttagaagaattagactcagataaatttaaaaaaattgattctaatataagcgcaggcggaagtaataaaccaataaatactattgtctggtattttaatcttttgaaagtgaaaaataaatttaatccagatgctatacgtttaccaattgttttagatagccctgcaaatgcagaacttgatagagatagtaaacataccttgctaaagtatatatttgaagaatcagataaagatagtcaattaatagtttctactataggattttcaacttctgactttaaagaagaacattttgataatgttatcgaactttcaaattctaaatatgagttattgaatacagaagattatgagctttataaagaactgtgtaaggatttagttttaataaacgaatag

SEQ ID NO: 93116 - DNA, 1083 bp, Listeria monocytogenes; identical to SEQ ID NO: 92888

SEQ ID NO: 93117 - DNA, 1695 bp, Listeria monocytogenes; identical to SEQ ID NO: 92889

SEQ ID NO: 93118 - DNA, 1083 bp, Listeria monocytogenes
ttgtcaaatgaagctatatatatgaaattgccctttgatttgtcaggctctcgaagtaaaaatagatttagatacgaaatactatggggtctcagtaaattatttgatatatataatgaaaatgagtcatttgttatggtatttgactatgcatgtgatatcgaagtacacaaagatactggctttgatttttatcaagttaaatctaaaaaagacggagcagtttatactcaaggagcattactaaaaaagaaaaaacttgaagaagaagaaaagagtttttctattctaggtaggctttatgcccttgcaaataatcaaaataagaatattcatgtaaatttagtttctaataaaccatttcaagactctagtaaaaaaaatcatacaacaattgaaaacttggatttcaataatctagatgaggaagtgcaaaaaacgatagaatctaaacttcaagaggagctaggttcggacgttacacctgatatgtcaaaaattagtttcatttatacttcgattgaccttttcagtcctgatgatacattgagaggaaagactagcaaatttttctttgaattaacaggaagtgagccaaacaaaccgaatgctctctataatttacttgttgaaacgatttctgaaaaagcttgttatgaattgcaattaaattgctattcagacatattaaatagaaaaggtgtttcaaaagatgatattgaaaaaataatttcactttattctgaaaaaactgatagagcagtagaaaaggcttcaatatttatagacaccaacataaacaaaccaataaaaagattgaaaatgaaaacgatgcttggtaaagtggtttccgatattgagagtggcaatagattagttttacagaatgaagagcttattgttcaatctatcttttcaaacttggagaaatatgatgttgaagagactgttttcattgatttgttagtttctgagtattcaaaacttttcactattgagtattcagaagactacagatatgccttttttttactaatcttaatgaaagtcgaggaaaatatttatgaatactctgacatttaa

SEQ ID NO: 93119 - DNA, 1695 bp, Listeria monocytogenes; identical to SEQ ID NO: 92889

SEQ ID NO: 93120 - DNA, 1083 bp, Listeria monocytogenes; identical to SEQ ID NO: 92892

SEQ ID NO: 93121 - DNA, 1695 bp, Listeria monocytogenes; identical to SEQ ID NO: 93047

SEQ ID NO: 93122 - DNA, 1083 bp, Listeria monocytogenes ATCC 19117; identical to SEQ ID NO: 92888

SEQ ID NO: 93123 - DNA, 1695 bp, Listeria monocytogenes ATCC 19117; identical to SEQ ID NO: 92889

SEQ ID NO: 93124 - DNA, 1083 bp, Listeria monocytogenes; identical to SEQ ID NO: 92888

SEQ ID NO: 93125 - DNA, 1695 bp, Listeria monocytogenes; identical to SEQ ID NO: 92889

SEQ ID NO: 93126 - DNA, 1083 bp, Listeria monocytogenes; identical to SEQ ID NO: 93118

SEQ ID NO: 93127 - DNA, 1695 bp, Listeria monocytogenes; identical to SEQ ID NO: 92889

SEQ ID NO: 93128 - DNA, 1083 bp, Listeria monocytogenes; identical to SEQ ID NO: 92888

SEQ ID NO: 93129 - DNA, 1695 bp, Listeria monocytogenes; identical to SEQ ID NO: 92889

SEQ ID NO: 93130 - DNA, 1083 bp, Listeria monocytogenes; identical to SEQ ID NO: 92888

SEQ ID NO: 93131 - DNA, 1695 bp, Listeria monocytogenes; identical to SEQ ID NO: 92889

SEQ ID NO: 93132 - DNA, 1083 bp, Listeria monocytogenes; identical to SEQ ID NO: 92888

SEQ ID NO: 93133 - DNA, 1695 bp, Listeria monocytogenes; identical to SEQ ID NO: 92889

SEQ ID NO: 93134 - DNA, 1083 bp, Listeria monocytogenes; identical to SEQ ID NO: 92888

SEQ ID NO: 93135 - DNA, 1695 bp, Listeria monocytogenes; identical to SEQ ID NO: 92889

SEQ ID NO: 93136 - DNA, 1083 bp, Listeria monocytogenes; identical to SEQ ID NO: 93114

SEQ ID NO: 93137 - DNA, 1695 bp, Listeria monocytogenes; identical to SEQ ID NO: 93115

SEQ ID NO: 93138 - DNA, 1083 bp, Listeria monocytogenes; identical to SEQ ID NO: 92888

SEQ ID NO: 93139 - DNA, 1695 bp, Listeria monocytogenes; identical to SEQ ID NO: 92889

SEQ ID NO: 93140 - DNA, 1083 bp, Listeria monocytogenes; identical to SEQ ID NO: 92888

SEQ ID NO: 93141 - DNA, 1695 bp, Listeria monocytogenes; identical to SEQ ID NO: 92889

SEQ ID NO: 93142 - DNA, 1083 bp, Listeria monocytogenes; identical to SEQ ID NO: 92888

SEQ ID NO: 93143 - DNA, 1695 bp, Listeria monocytogenes; identical to SEQ ID NO: 92889

SEQ ID NO: 93144 - DNA, 1083 bp, Listeria monocytogenes; identical to SEQ ID NO: 92888

SEQ ID NO: 93145 - DNA, 1695 bp, Listeria monocytogenes; identical to SEQ ID NO: 92889

SEQ ID NO: 93146 - DNA, 1083 bp, Listeria monocytogenes; identical to SEQ ID NO: 93114

SEQ ID NO: 93147 - DNA, 1695 bp, Listeria monocytogenes; identical to SEQ ID NO: 93115

SEQ ID NO: 93148 - DNA, 1083 bp, Listeria monocytogenes; identical to SEQ ID NO: 92888

SEQ ID NO: 93149 - DNA, 1695 bp, Listeria monocytogenes; identical to SEQ ID NO: 92889

SEQ ID NO: 93150 - DNA, 1083 bp, Listeria monocytogenes; identical to SEQ ID NO: 92888

SEQ ID NO: 93151 - DNA, 1695 bp, Listeria monocytogenes; identical to SEQ ID NO: 92889

SEQ ID NO: 93152 - DNA, 1083 bp, Listeria monocytogenes
ttgtcaaatgaagctatatatatgaaattgccctttgatttgtcaggctctcgaagtaaaaatagatttagatacgagatactatggggtctcagtaaattatttgatatatataatgaaaatgagtcatttgttatggtatttgactatgcatgtgatatcgaagtacacaaagatactggctttgatttttatcaagttaaatctaaaaaagacggagcagtttatactcaaggagcattactaaaaaagaaaaaacttgaagaagaagaaaagagtttttctattctaggtaggctttatgcccttgcaaataatcaaaataagaatattcatgtaaatttagtttctaataaaccatttcaagactctagtaaaaaaaatcatacaacaattgaaaacttggatttcaataatctagatgaggaagtgcaaaaaacgatagaatctaaacttcaagaggagctaggttcggacgttacacctgatatgtcaaaaattagtttcatttatacttcgattgaccttttcagtcctgatgatacattgagaggaaagactagcaaatttttctttgaattaacaggaagtgagccaaacaaaccgaatgctctctataatttacttgttgaaacgatttctgaaaaagcttgttatgaattgcaattaaattgctattcagacatattaaatagaaaaggtgtttcaaaagatgatattgaaaaaataatttcactttattctgaaaaaactgatagagcagtagaaaaggcttcaatatttatagacaccaacataaacaaaccaataaaaagattgaaaatgaaaacgattcttggtaaagtggtttccgatattgagagtggcaatagattagttttacagaatgaagagcttattgttcaatctatcttttcaaacttggagaaatatgatgttgaagagactgttttcattgatttgttagtttctgagtattcaaaacttttcactattgagtattcagaagactacagatatgccttttttttactaatcttaatgaaagtcgaggaaaatatttatgaatactctgacatttaa

SEQ ID NO: 93153 - DNA, 1695 bp, Listeria monocytogenes; identical to SEQ ID NO: 92889

SEQ ID NO: 93154 - DNA, 1083 bp, Listeria monocytogenes; identical to SEQ ID NO: 93114

SEQ ID NO: 93155 - DNA, 1695 bp, Listeria monocytogenes; identical to SEQ ID NO: 93115

SEQ ID NO: 93156 - DNA, 1083 bp, Listeria monocytogenes; identical to SEQ ID NO: 92888

SEQ ID NO: 93157 - DNA, 1695 bp, Listeria monocytogenes; identical to SEQ ID NO: 92889

SEQ ID NO: 93158 - DNA, 1083 bp, Listeria monocytogenes; identical to SEQ ID NO: 93152

SEQ ID NO: 93159 - DNA, 1695 bp, Listeria monocytogenes; identical to SEQ ID NO: 92889

SEQ ID NO: 93160 - DNA, 1083 bp, Listeria monocytogenes
ttgtcaaatgaagctatatatatgaaattgccctttgatttgtcaggctctcgaagtaaaaatagatttagatacgagatactatggggtctcagtaaattatttgatatatataatgaaaatgagtcatttgttatggtatttgactatgcatgtgatatcgaagtacacaaagatactggctttgatttttatcaagttaaatctaaaaaagacggagcagtttatactcaaggagcattactaaaaaagaaaaaacttgaagaagaagaaaagagtttttctattctaggtaggctttatgcccttgcaaataatcaaaataagaatattcatgtaaatttagtttctaataaaccatttcaagactctagtaaaaaaaatcatacaacaattgaaaacttggatttcaataatctagatgaggaagtgcaaaaaacgatagaatctaaacttcaagaggagctaggttcggacgttacacctgatatgtcaaaaattagtttcatttatacttcgattgaccttttcagtcctgatgatacattgagaggaaagactagcaaatttttctttgaattaacaggaagtgagccaaacaaaccgaatgctctctataatttacttgttgaaacgatttctgaaaaagcttgttatgaattgcaattaaattgctattcagacatattaaatagaaaaggtgtttcaaaagatgatattgaaaaaataatttcactttattctgaaaaaactgatagagcagtagaaaaggcttcaatatttatagacaccaacataaacaaaccaataaaaagattgaaaatgaaaacgatgcttggtaaagtggtttccgatattgagagtggcaatagattagttttacagaatgaagagcttattgttcaatctatcttttcaaacttggagaaatatgatgttgaagagactgttttcattgatttgttagtttctgagtattcaaaacttttcactattgagtattcagaagactacagatatgctttttttttactaatcttaatgaaagtcgaggaaaatatttatgaatactctgacatttaa

SEQ ID NO: 93161 - DNA, 1695 bp, Listeria monocytogenes; identical to SEQ ID NO: 92889

SEQ ID NO: 93162 - DNA, 1083 bp, Listeria monocytogenes; identical to SEQ ID NO: 93114

SEQ ID NO: 93163 - DNA, 1695 bp, Listeria monocytogenes; identical to SEQ ID NO: 93115

SEQ ID NO: 93164 - DNA, 1083 bp, Listeria monocytogenes; identical to SEQ ID NO: 93160

SEQ ID NO: 93165 - DNA, 1695 bp, Listeria monocytogenes; identical to SEQ ID NO: 92889

SEQ ID NO: 93166 - DNA, 1083 bp, Listeria monocytogenes; identical to SEQ ID NO: 92888

SEQ ID NO: 93167 - DNA, 1695 bp, Listeria monocytogenes; identical to SEQ ID NO: 92889

SEQ ID NO: 93168 - DNA, 1083 bp, Listeria monocytogenes; identical to SEQ ID NO: 93114

SEQ ID NO: 93169 - DNA, 1695 bp, Listeria monocytogenes; identical to SEQ ID NO: 93115

SEQ ID NO: 93170 - DNA, 1083 bp, Listeria monocytogenes; identical to SEQ ID NO: 92888

SEQ ID NO: 93171 - DNA, 1695 bp, Listeria monocytogenes; identical to SEQ ID NO: 92889

SEQ ID NO: 93172 - DNA, 1083 bp, Listeria monocytogenes; identical to SEQ ID NO: 92888

SEQ ID NO: 93173 - DNA, 1695 bp, Listeria monocytogenes; identical to SEQ ID NO: 92889

SEQ ID NO: 93174 - DNA, 954 bp, Acholeplasma laidlawii PG-8A
atgttatggggaattagtaaaatatatgatctttatttggagaacccagatgatttttttgttatatttgactatgtttgtgatattgaagttggattcaatgatacattgcatttttatcaagtaaaaacaaaagatactagcagtccttttagtatttcggatctaattagaaagaagagtggtcattcttatttatccttgcttttttcattgaaggtaaacaatcaaatcaagagtattaatgtagtttctaatacaaaactatcaattaaaaataccatacttcaaaattctgagataataccttttgaaagtttagaagatgatgaaaagaaaaaaattgaagatcatcttaaagcaaaatctattctagtcacagatctaaaggactcattcttcataaggtcagatttttgcattaataatcccgatacattattaataggtaagactgttgagtttttagaaaatgcaaaaggtattaaattaagtgaaccaaaactgatatataattacataaagggattggtagacagaaaagcaagttatgagttgaacactattgatttaaatgatacgatcgataaaaaaggaataaaaagaagtgaaattgataacatattgaataatttactaggcgctgacagatatagagaaaagactttatctaaaatagaggcactaaatggtgattataattatggagaagtattgcttttaaaaaccgcattgtctagagtttttaaatatgggattacatcaaaaacaatagaagcactaattgtagatattagtaattgtatcaatgataatgaaagtactattcaggatttgaaattatctgagatagtcgaatatgtctataattgtattgaatgggatattatcaaggataagtcagaaagaaagtgcataatactattgacattaacaaaaatggaaagcgtgtag

SEQ ID NO: 93175 - DNA, 1686 bp, Acholeplasma laidlawii PG-8A
atgaaaaacatgattgtaaatagcattgctataattagtcctaatagtaaaacagcaaaatatgctgaatttactgcaggaattaatgttgtcacatctaacaaaaatataaacggtaattatgtgggtaaatctagtctactaagaagtatttatcatacattaggagcagatggtaagtttacaacaagcttatgggaaagagaaggcaagtacacatacatactagatttttcaatcaataatagcagatttagaatgttaagatttgataatctattcaaattgtatgatgaaaacaatagtttattatttaaggttataaatagaacagacctagcaatcgaacttaacaaactgtttaaccaagaaatttatcttaaaaataagaataacgaatattctattgcacatcctgcatttaattatctattaaattatattgatcaaaaagaaatccgtgtgtcggaatttagcacatttaatggtttgaatgcattttctgccttttattctgatttattatactcacatttgggtgttaacaacaagcaatttaatgagttgaaaattgaatcagatgaattaaatagaaaaatcggtgaaataaataagaagaacctaatgttcaatgaaatgctagcacaaatagataagaataaagatttgaattcaaattactctgagattgaagttttaaaaaaagaactgcaaaaacaccaagatgaatatactaaactcattggtgaagcaaacaagttaaaagaaaaattacttaagacaaatgattctaagatagagattgagtttgctattaatgaattacgaaaaatgatcagttctgatgagaaggtattagataaatcaattaaggaacacacatgtcctatctgcaattcagagctaagagatgatagtcatgcatatattcataaagcagttgatgttgatggtgcaaaatttcaattacttgatgctgaaagagaattaggtaaacttagtagagaaatcattttaactaacagtaagtatgaagacaatcttgcggaactgaaaagaattgaagcaagagtttttgagggtaataagggtttggaagatacaataaaatcttatggaatgaaaaagattaaggcaaatatatttgaagaaatatcaaacaatgaagtatccaaaaatacatttattgaagacagaaaaaagattacaaagctactcagatcgcttgatgagagaaaaaaggaagttaacaaaaaatatttgactaatttctatgatatttatcaaaaatattcgcttggtgggtttgatttatcttcaatagatagtgttgaaacaaagatcaaagttgatggaacgagagttaatattactcaggttgcttggttatgttcattgttgaagaccaaatacgaatttaatccggatagtttaatttaccctttagtatttgacaatcctaataatgctgattttgatgaggataatgaaagaaaaatatttaatttgatatttgataacttaccggaaaatgggcaaataattacatcgttagttggatttgatcaaaacctgtataattcatatgaaattaagaaaaaaataatgttggttaatcctgaaaattcactattaaataatgatgattttgaatcgtgtttagatagatatagttcaattttatag

SEQ ID NO: 93176 - DNA, 1170 bp, Yersinia kristensenii
atggttcttgaaacagtaccaccaagggagcaatctggcagagattcattcgcccgctaccgtgctcaagttcgttcagcagcaattgcggctctacaaatgctgtctagtacgacgattgatcgtgtgtactgcgatttgcatgatgatgtagtcgttcgaaaaaaagacgaaaatggtctgacctatgtgttttatcaggttaaaactagggcaaaacaaaataagaactggacattgggtgaagttttcggaattcaacctacaaaaaagacaatttgcgacaagtcaattaaagaaagctttgtagggaaaatgttactccacactataatattcgaccaacattgtaactcagtgatcttccagacaaatattcacaatgatgataacattgaagatctgctctctgatatagaaaatggtatatatgtaaacaagttcagtcgcatttttttagagcgattcaacaatatatatcctaatgaaatagccactcccttatcagaaaatgaaataaaagaacgcttgtctaagttaaaatttgaaaatgacgttcattatttaaaagatgactcatcatacttcgctcctttggctagagagagaatatatcaatatagcgagattgatcttactcacattgagtctagcgacatcataattaaattactggagcttatctcaagtaagtcctctggtgtaattaaaccattcactaaagaatcaattgaaaactctgctgctgtttcaatcaatgatttattaccactccttagtctctctaaagaggcttatgaacaaattttgcaaggtggagaccctaaagcgataaaatcagtttcaatcattcagcgaacactattaagtgctggggcaagtttagaagatgtaacattctgctctaaatgcaaaactgaatgggatgtttggtatagaaacaatagacataatatatcagaaatagacctaaggtttattgtaaataaagtaagagagttgttgagaaatgttcagtcaagcaaagaccaatcactcacactcggtaacctttacactccacttaaacaattattgacggagttaaaatctcttgagttggaatttgatttaacaacagaaatgctgtttggagcagtattttcagagcttgtgaaaggtggcatatga

SEQ ID NO: 93177 - DNA, 1767 bp, Yersinia kristensenii
atgaggttattaaaattaaaaatatttcctaaaggtcgtgatggttggatgtccgaggaattaattttcgctgagcatataactcaaatatttgggcccaatgggtgtggtaaaacaccagttgtacaatcaatatcgtattgcttaggctatccaaatgtatttagaaatgatatttacgaaagatgtagtcatgcaattttacatgtaataacagcaaaaggagagtatcaattcaaaagatattatgagaaagatcaattacacattaatattactgaaccaaatggtgtaattcaaacgttttacgatgagacaagtcatagtgaatttatctttgatctgatggattttaatgtaaaccagttggttacaataaatagcaaggcgacatccccatatttatcattattacttccaattttctatttagatcaagatgatggttatgggagaatatatagtccgcctaaaaacttcattaaagatcagttctctgagattgtcagaatggcattccgattgcctccaagaaactcagtagatgaaaaacgagagaaaaaaaccgccaaagataatttagacagtctagacagggtagttcaatttcttgaacggcaagtagaagctgtaaaaataaaatcccccgagattactaaaacaccagcacagctcaggtctgaaattcaagatttagaaatagagttagagcagcttaaaggggctggtaacagtcatgatgattctattggcatctatgatcgattgatatccaatcaccgaacagaaattcgtgatcttgaagtacaaattgctgaaatattaaaacgacaaaatggaatacaaaaaataattgctgatattaatactgaaattgaaactttaagtcttaatgaaggtgccaagagaatttttttgtcattcgatgagatctgcggctcaaataattgtcagcttttctctctgagctcaaactcctacagtaaaaacctattatatctcaaagaccaattgaaagacttggaacggaatagagtttctgactctgtcacattaactcatttacaaaaaacaaagttaaattatagaaccatccttcaaactatcattgatgaacgaaatgcctcaattcaaaagccagaattagcaactttagttgatgctatatctagaataaaaaataaagtatttgaacttcaaacacaactcagtgagatagaacatatattattattagaagacaggttgttcactaaaatcactgagcgcaactatgcttttgaaaaacacaaaggattaactggaacacgatctacatcgccagaactgatgaagctcaaacttgaattgaaagaactgttcattaattggctagattctatacacacaacgaatataagtaaggatatcacttactcggatgatttcactccaaaacttggggccgaaaacataacacaactaaaaggtagcactcgaatcagaactgttttagcatatcatgcagctttaattgaactcctcatgcaacaaccgaaagcaaattttagatttattatcctcgacacgcctaaacaacatgatatagaaaataaagacttagacagttatataaagactttaaaagtgctagcgggattgaaaaatgtccaaataatattttccacaactggataccattataacggcgatcaggatgataaagaatggaacccaaaattcccgggggatgatcatttaatgttttttaaaaaaatgacaatttag

SEQ ID NO: 93178 - DNA, 1131 bp, Burkholderia pseudomallei
atggcgtcatccgcaacaatcgtggagctctgtcaggttgagaacgatgatgatctgcacgaattcgggggtgggcacggaaacaagggcaacgacttcgcccgattctggctcataagcgagttgatagcgctgaccgaagtcggcacaaatgactacctctttattctagagtacgttcaagacgtcgctcgcatagacgacccggcggcacctgcggcgatcacactatatcaactcaagaagaaggaaggcagcgtttgggacctcaactcgttagctggtctcactgaaaagggaaagcaggtcaaacccgcgtcgccactcgcgaagattgtgaaatccgtactcggctttaagatgctgtcggcaagcgccgagttcatctccaacgcacgatttaacgtcaaacttgctgcgggcgggactgctcttcagatggactatctttccttggcagacctgcaggttgaaaggcagtccaattttcgtgacagtgcagcagcggcccactcggtaccagcagcgaccattcctcttcagaaaattggccttcggtatgcacctatcgaagtcaacgacatgcgagtacatgtcatcggggttgctcacggattcctcaagaagctcagtatcgcccatgcggcacaggctgactcgttcgtggacgccttattcgcaaagctagcgaccgcctcacgcaacacgtccaaatgccagacgtgggaagaactggtcagtaagcgcggttacagcaagaagcagttcaacgacgcactcgccgcgctacaactgctgcctgatcagcaaggtcgacgtgaaactctgctcaaggagctcgcatcagcgctcgagtggcacacacgtgatcagatgaggatagaagtcgccctaaccgaactagctcggttgaaagtcaccggtggcgaactatctatcgcgaacgtcgattgggctgcactacgcgccgtgagcgcaacagcagaagccgaatcctggtcaaccgcaaaggagttcgaggccgtcgagagctgcctcaagggatttcttccagacgaatccgtcgcgcgaatacgcgcactagccatttacgggatggtccaagcatggacaagccaaacgttcgcctaa

SEQ ID NO: 93179 - DNA, 357 bp, Burkholderia pseudomallei
atgcaaagcttgcgattcaacagaataagcatctgctcggagaacgagcagaaagcatacagcgagacgttccacccgcggaaaacgttgctactgggcggaaactcgacggggaaatcgacaattatcaaatccctcttccgggcatttgacgcagaacctactggggatctacgaaactgggactactcggcgatcgttgccgttgatttttccgtcaacgacatagcgttcacgacaattcgccgtggcgatctaaaggcacttttcgcggccagcaactactgggagccactacaagcagcgctcgttggaatgagattttttcggaagccgttggctttcacttgcaactga

SEQ ID NO: 93180 - DNA, 1089 bp, Acinetobacter haemolyticus
atggaaaataatccactaaacacgacccaacgtgaaacagtaggaatagatacccaactaagatttaactatcaaacagactgggctattgtttatatattagaaaaaatacttaaagatgaagagtttgtaatcttcatggaatatcatgaagatataatttgttcaaactcaattcactttcacgaaaatattgaatttgaattctatcaattaaaaacttctcgatctaatttcaccttagataatatttgtaaatatgaaatagactcaaaatctaattcagttttaggaaaaatgatattaagcattgaggacaaaatttttaaaaaaaatgtaaagaaattatgtttattaagtactagtgatataaattttaaaagcaaaattagtactttaggagaatataagtttttaaaagacttaaataaagatgaagtagaaaaaatatttaaatatcttgaaattgaaataaaaaaaattgatctaggatttaaagacattatttgtttccaaaaatcaaacctaccatttcatggttcggaaagcacaactaaaggtaaaatatcagaattcattgataaaaaatatggcgatattaaatctaatgtttcaagtatctaccgtgccttatgggatgatctaaggattaaacatgattttttattgccttttgataaatgggatgaatgtgtaaataaaagaggtctaaaaagtgacgaagtaaccacaatattaaccaaaaatattgattttgatctaaatataaatttaagaaaattcattgaaaattatattatgaatatcgaaaaggatgaaatttttgcacctattaaaataagcaatataaacagatatcatatcaacttaattactaatcgctcccctgaattattgaaagagataaaatctttaagagcaaaaatagtaataagcacagatatttttgatgccaccaaatattcgactataattaatgaaatcgaagatcaagtttctaactatccaatattaaaaggatttaatcagatgaaagccgtttcaatttacgaggtattaaataaaatctatgaagaactcacaaaatga

SEQ ID NO: 93181 - DNA, 1671 bp, Acinetobacter haemolyticus
gtgaaaaatatcaacaactcttttcaatttcagaaaataatcattctatcccaaaaagaaaagtcagggacagttttaaacattcatccaaaaactctaataacaactaaagaaaatactattggtaaatcaactttattaaattgtcttttttggggaattggttgtgaagttagatttgaagaggattggaagctcttagatataattgtattagtagagttttcagtcagcaatgtaaaataccaagtaaaaagagatagagattccatttatttttttgatactaaaggaaacaattggattcaatatgaaaagattaaaggtgaatatttagataaattaaataaaatattaaatttcaatattctacttaaaaaccagaactcaaaatccttatctagtgttccccctgccttctatttttcatctacatatatcgaacaaatgaacggatggaatgaaatttggaattcttttaacaatttaggacaatttaatcttaaaaataagcgagaaatttccaattatttatgtggtatttatgataaaaactattatgacaataaaagagaaaagaacaacttcgaaattgataattataatataactcaatacatcgatgagagcttatctgttgtaaaatattttgataaatatgattctgattctatttcaccagttgataattttaaaatatctgcaaaaaaattaaatgaaacagaaagtattcttgaaaaaaagcgaaaggaatacatatctagttcttcaagattaacttcaataaataatgaaattaatattattttaatgtctattggtgagctaaacaatgactatgtatattctgtagaaaatattgagcaaacatctattcactgtccaacttgtggtgtcgaacatcataatagtttagtcaatagattctcaattatccatgatattgataaattaaaattgactatcaattctttaaatgaagaaaagttcttgcttgagagaaaaatttcaaacattttggatcaaaccaatcatctcacagaggaactaaactcccatttctactcagacaatacacatcaaaatttaaataattacattttaaatcaaacacttaaaccttcaattcaaaacagagttgatatgttcgagagagataaaaaatccaatagcaagctcatgagaacactcgatcgccaaaataaaattattaaagaaacaaatctgaataaagtagaagatgatcttttaacttattttaataaattatgtactaagttgaaaattaaaatttttcagaaagataacttagatgaaataattaactatcaaggtggcggtgcaaatcagattaaagccatgcttgcaaaaagattaactatcttgaaagctctaaccgagcattctgaaatatctactccacccttcgttgttgactctctaagacagcaagatgtagatgacaataattatgaaaagttattgcagactttaatacaagaaacgcctaattctgtccaactaattttagcggcagtcaaaaatgattttactaatgcaattaaagctgatttcgaagaaatatttattgaggacagcttattgaataaaaaggactatcgtagggcaagttatatgattgaacatggtgtgatcaactcatccagttag

SEQ ID NO: 93182 - DNA, 1089 bp, Photorhabdus luminescens subsp. laumondii TTO1
atggggctagctgaagctttgattagtattccacagtctgaaagaggtggtgagattgctcaacgagggtttgactatcagacctgttgggctttgtctcaaatgttggaatatgaactggatggaaaaaactatgtatttatcttcgagtatcatgatgatgttctaatattagatgatgaatactctccaacagacctcacttttgctcaggtaaaaaccagtgaatcacattggactgcttatgatttacacaaaagcacaaagagaaaaccaatatctataattggcaagctatttattcaccatagaaacttttgtaactactcgcctcagctattgtttgtgactaatgcgtcatttaatttatgtgagaagaatggtggtaaatctttatttagtgcaagtgaaataaaagatgagcataagattagcttcaaacaagcaatcaaagaccaagtgaagctcgatgatgaaaacattgatctttctatattgaagtttgttcaatcctcattaagcctagatgaccacatcacacacttaaaaggtaaactgtgcgatttcctttgtaataaattcggtgatgacactacattaagtgtaaatgtgctagcagctttgcttgaaaaagaatgtagaaacaaatctaaggtaaaatcagctgatatcgttgatttttcagaccttatatctcgaaaagggttttcatcccgagcatttaatggtgttctagactcattgaatgtaagtaatagtatgaagcctgattggaaaatggcggaaactatattcaacaacctcggtaagactctttttgagattattccgctaaaagcgacgttctcacaagtttgtatcgaccttaaccaaaatacaaagaatccgtcgactgtatatctagaatatgcaattaacctttacgatgaggcgagcgtttattcggatttgaaaatgtatgtaactggaattattcacaaaattgatgcactttgtccggattatacattggccttaaagtcaggaaagaaagaatgtattgttgtttactcaataatccagaagctattagagggaggtaaggtatga

SEQ ID NO: 93183 - DNA, 1653 bp, Photorhabdus luminescens subsp. laumondii TTO1
atgagaagcatctactttaaaagtgctcacatattatcccttcgtgataagaaaggcttctttttcgagttctcaccagacataaatatcattactggtgagaacgacacagggaaatctagctttatcaagagcctatatcatacattaggtgccgatgttcgactggataaaaagtggaaggatgataactttgtttcaaaagttgttatttgcgttaataatcgtgactatgcatttattcgtcacgaaaaacgtatttccatcttcgatattacagaagaacaagagcacctcttagtgacctctaattctcgtacagatattgcattgactgtacgagatatctttgactttaatttagaattagtcttaaaggaaactttagttcaagggcaagcacaacctgcaagtctttatcttccattctatatcgaccaagataacggatggggtacagtattagattcattcagtagtttgaaaatgtacaaagattggcagaaaaatattttaaacttccatgctggtgtaaaacccaaggagtattacaaacttcaagggaaaatcaatttaattgatatcgaccttaaagaaatcagagcaacattaaaagctctggaagcagctaagaagcgtttcgaagaatcattcggaagagtactttttgatgttgatgttgaatattatgaagaattattagagcgttttcttcgtaagtgtcaatacttgcataaggaagaaacagggtacagaatcaaactaatcaaagtcttatctcaacgagacgaattagtggcagagatagaagagtcaaaaagacaactttatgaaaataacatcgattctctatctacatcggcaagtttagaagctaagtatgctgtacttgaaaatagagagaagcttttgcaaatcatacctgaattgtatgaccaaaagtcagtatatgatgagcaaattgccagtatcaaagaagatttgaaaaatgctcaaagattaagctctgagcttaaaggtatgcttcaagaagttaaagaacagttaactcttcaagacgttataaaatctcaagcaagtaagcaggttgaattcactttcgatgagcaaattaatgagttgctacaaaaaataagtgaattagatgttgccagaaccaaactctcgaaagaaatagcagagttcgatgataaaaaacgaacaagtgaaatcaatgaaaaatttaaagaatcattgaagttcgcacaaactgagttaggtattaaagacccaaaagttggaactattctccagtatggtccgatatctaagagtgaaactggcagtcgtgctcctagagcaatattggcttatcactatgctcttcttaaaacgatagaagataagtcaacaagccctatgcttcctgtggtaattgattcgcctaaacaacaagaccctgatccacatacgacgaaaaaattattcgatttatgtattgatggtctatcgactaataatcagctaattatcggttcagtttcttttgagagagaaacagatggatttaaaacattgacaatgactgaaaaatacagcttgttaaaagtaaatctatacgataaggtttaccagcaagttatgcctttataccaaaaagcatcgttgtcttaa

SEQ ID NO: 93184 - DNA, 1086 bp, Photorhabdus luminescens subsp. laumondii TTO1
atggaacgtaatgttttgggtcatgctcaaagagaaatttcaggagcaaccacattcggaaaatatgattttcaatatcattgggccttatgcagaataattgaaaagcataaatcaaattctgactatgcattattaatcgaatatcatgaggatgtcgttatcgcagactcattgtatggaagttcggcaaaatttgaattttttcaagtaaagaatactggaaaacctttcacttctgacgccttaaccaaacgagagcaaggtgctgagggagctaagagttccattctaggtaagctattaagctcatgtattggtacagactatgaagcacgcattacggaaatcggtcttgtgtcctcaagtggtttctcatttgaacaaagagataagaagttaaaattagacattataacttcaggtgatcttagtgtagattgcttatcggggttaactgaaaaattaaaggatgagcttggaatagctctcttgccagaaaatctaaaattcattgttccaaaaataaaattagagaaccaagaagagtttgtcattggtagatttgctgaattagtaaatgaaatatttccaaatagtcattgtaatgccgttaatatttatagagcaataatcgatgaaattcatcgcaaaggacagaatacttacgattttactgtttgggagaaaatggtagaggataaatctctcacatctcataaggtaaaggatgttatagctgttaacacaacaagcccaaaatttgaagactttgagaaagactttgagtacttagctaaaaatgatatgaaatggaacaccttaacttatcggaagattaataaaaaaataaaacaacttttcttgcgccgaatcggacatttgtcggcttttgatatgaatataatgagaatagtccagcaggcgctaagtagtgtcccagaagaagactttacagaaacccgtgattacattgagtcagttattgtaaaagctcaagaacttaatattgaagatcaagtaccagaacatgacgatatattatgcgagatagtttatagctttttaaaggtgatgcatgaataa

SEQ ID NO: 93185 - DNA, 1734 bp, Photorhabdus luminescens subsp. laumondii TTO1
atgagaagcttgaaatttcaacgattagttctgatatcagattcgaaaagacttgcgaatcagttctcgttccagaaaagattgaatttaattaccggaaaagataacagtattggcaagtccactctagcaaaaagtttactgtggtctttaggatgcgatcctgttttcgatgaagaatggaaatcaaatgacattaaatctattttatattttactttaaataacaaagagtatttttcatgtcgaggaagtcactcaataattttgggagctatcggtgatgaagctcaaagatatataaatataactggtgatttttcgaaaggcttctcggatctcgtcaatttcaaaatgaagcttcctaatcgtggtgatggaaacttggagacacctcctccagcatattattttttaccattctatattgaccagataaaaagctggagttcaccttggaattcattcgagaacttagggcaatattccaactggaaaggtccattaatcaaatactttactggttatcttaagcctgagcattttgatattgaggaaaacatttatgaatatagtgaaatcaaaaaagaatcagcacataaaatagaaaaatttcaaagcgccgttgaagttatagttgataacacggttgattcccctataactttagataataatgacttcattaagattcagaatgaaataaaaaatgaactttacgacttgattgattaccaaacaagactttatgatgctcaggctacgatcacttcaaatatttatgatctcgaaagtcagtatgcgttagccattacttctgcaaacgaactcgaggcagattataaatttgcggtagaatccatacctactgattatttagagtgtccattgtgtgggactcttcacgataactcactacctaacagagcgttgcttctttcagaaaaggactcattgcttaatgaggcaaattcaatagcatctaaaatagtggaactcaaatcttcattgaactcattaaatgaggacgctcagtttattactaacgaaatcgaaagaataaataataaatacattacagacgacgatgcggttaaaaaaggtctcattgctcaagtaatcgatactctatctactgaaaacgtctcaaaaaatattcaaattaaaatcgataatgaagaccttaacatcagcaaggccaacagttccatcaaggaattaaaaaaggaccagaaaaaacttctttctaccaaagaaaaggaagaattgaactcgtcctttatgtcaaaactgctggcaaatattgaagcactgggttcgacaggaataaaccttagcaaagttaaatcacccactgattacaaacagttgcttggtggtggtgctgctgaggctgctagaggattacttgcttatcaactctctgtactgcaacaaattcatggtgctaaaacttgcgtagtgcctcctttcgtcatcgatacgcccaaccagcaggaacaggcgggataccgttatgaaactgtcattaaagaattaatgcgtagcgttcctcaggattatcagataatactgtgtgcaatggagaatgatgcattaaatgaatttaaacatgatgctaatgttattgtgttaaattcaaatagacttctaactgcttcacaatacgattctttgaggtctgaatataaatctattcaggcaatagttacagatcaaagtgataaggaataa

SEQ ID NO: 93186 - DNA, 1047 bp, Mycoplasma hyosynoviae
atggatagaaaagattattatatgaatttgccgaaagaatcttctggaagcattgcaaaaaatagatttaaaatagaagtgttatgaggcattggtaaaattttagatgaatacatagcaaaaagaagttatactattttttttgattataaatgtgatatagagttacataatgataatggaatttgattttatcaaattaaaacgctaaatgatggtaattttaatttaaataagttgtgtaaagtacaaaaaaataaaaaaaactctattttaggaaaaatactcaaattatattctcctgaacaaaatataaaattagctattgtttctaatgtgagactaaaaataaaaaataggcgtaatcaatttaaagaacaatgtttcaatgattttgatcaagatgcacttgaatatattgaaaaaatgttatgtgaagaattggaagttaaatcaatatgttttaatgatgttttttatatatatgataatattaatttactaaattatgatgaaactattttaggtaaattagtacaatgcttttctaaaagtgaaaggggagaaataccaaatcctaatgcatttttcaatttaatatatcaaactgcaacaaaaaaagcaagttgtgaaagtgatttttctacatttgaagaagcaaagaaaaacaaaggttttactagtgaagaatttgagcaacttttaaatacacatatagattcatcagatatatgaattgaaaaaacaagagaatatattggtcaacaaataaaaatgccagaaaaaagaaaatacaatatagctcttgcggaaataattcaaaaacagaatgatctttctttaaagaaaatagaaaaagaaatctttaaatacattgagaaaaataatcctataactaatgatattaattcatatttaagaataatttcagaaaaatttgataaaaattttgaagttgaatattcagaaataacaaaaagagttgtatatctattagtttaccatatatatgcttgaggtggagaagtaaatgaaaataatatttaa

SEQ ID NO: 93187 - DNA, 1680 bp, Mycoplasma hyosynoviae
atgaaaataatatttaaaaaaatttatatatttgatttaaaaacaaaaaaagcatattttactgaatttgaagaggggcttaatgtaattacatcaagcgaaaaaaatggaaatgaaagaggaaaatctcttttattaagaagtttataccatacattaggagctgattgttatttttctaaaaaatgagatcaaaaaagcaaagtatatattttgtttcttgaagtagatggcaaaggttatgtaatttttagaagtgaaaaattatttaagatatttaatgaaaaaattgagcttatgtataaatgtaataacagatgagaattagcaaatacattagaaaaaatatttaatttttcaatatgaatcccaaatagaaaagaaaacaaattgaatatagcaccaccagcatatagttatttaatcaatttcatagatcaagattgatataaaggttcatattttaaatcattcaaaaatcttgaacaatttgaaaattttaaactttcagttatttattcacatttgggtatttataataaaaaatatttcgaacgtataaaagaaaaagaaaaaatagaagataacattaaagaaataaaatatgaaattgaatttcgaacaaaaatgaaaaaggaacttgaatcagatttagtgaattattcatgtcctgaaaattatgaagaactaaaaaatgaaattttgcttgaatctcaaacttattcatctttaattagtgaaatgagtaaaataagaaacaaaattattgatttaaaaaatcaattaattcaacaaaaaatgatcattggtcaaataacagaaaatgtgaaaagtacagaaaaagatattaataatatttgaaaaacaaataaatgtattgaatgcaattctcttttaaataataaatttaaaatattgagtaaaaaatacaactatattgataatattcactttatgaaaaatattttagataatgagaatttagatataaaaagagatttggaaaaatatagaacaaaatacttaaattttgttgaacagctaaatgaatatgataaaaaaattagtaaaaatgaaatagaaattaaagaatattttaaatttagagaaataaataatttagttaataatcttaaaaaagatttaatatccctccccagagagatagaaaatttaaatattaaattaaataaattaaaagaaattaatgatgtaaaagataaaatcaaatcgattgacattgcttataaaacattgattagtaaattgaaatctaaatttaaattagaagaattaggtgatgataattttgatagaatatcaaaaaatttttctggaagtggaagtcgtgttccacttgtaactttgatttgatattttactattaatgatttaaagcaaaaatttaatcctaatggtgcaatgtttccgatggttcttgatagtcctaataatgctgaaacagacgaagataagaaaaaagagatatttaaatatattattgaatcatcaaaaaaatttgatcaattaattttttcaacaataggattttcagaagatgactataacattgaaactaatgtaaatattaaagttttaaaaaatgagaaatataaattgttagataaagatacatatgaaaaaaacattgagattttaaatatcactaattttgcttaa

SEQ ID NO: 93188 - DNA, 1047 bp, Mycoplasma hyosynoviae; identical to SEQ ID NO: 93186

SEQ ID NO: 93189 - DNA, 1680 bp, Mycoplasma hyosynoviae
atgaaaataatatttaaaaaaatttatatatttgatttaaaaacaaaaaaagcatattttactgaatttgaagaggggcttaatgtaattacatcaagcgaaaaaaatggaaatgaaagaggaaaatctcttttattaagaagtttataccatacattaggagctgattgttatttttctaaaaaatgagatcaaaaaagcaaagtatatattttgtttcttgaagtagatggcaaaggttatgtaatttttagaagtgaaaaattatttaagatatttaatgaaaaaattgagcttatgtataaatgtaataacagatgagaattagcaaatacattagaaaaaatatttaatttttcaatatgaatcccaaatagaaaagaaaacaaattgaatatagcaccaccagcatatagttatttaatcaatttcatagatcaagattgatataaaggttcatattttaaatcattcaaaaatcttgaacaatttgaaaattttaaactttcagttatttattcacatttgggtatttataataaaaaatatttcgaacgtataaaagaaaaagaaaaaatagaagataacattaaagaaataaaatatgaaattgaatttcgaacaaaaatgaaaaaggaacttgaatcagatttagtgaattattcatgtcctgaaaattatgaagaactaaaaaatgaaattttgcttgaatctcaaacttattcatctttaattagtgaaatgagtaaaataagaaacaaaattattgatttaaaaaatcaattaattcaacaaaaaatgatcattggtcaaataacagaaaatgtgaaaagtacagaaaaagatattaataatatttgaaaaacaaataaatgtattgaatgcaattctcttttaaataataaatttaaaatattgagtaaaaaatacaactatattgataatattcactttatgaaaaatattttagataatgagaatttagatataaaaagagatttggaaaaatatagaacaaaatacttaaattttgttgaacagctaaatgaatatgataaaaaaattagtaaaaacgaaatagaaattaaagaatattttaaatttagagaaataaataatttagttaataatcttaaaaaagatttaatatccctccccagagagatagaaaatttaaatattaaattaaataaattaaaagaaattaatgatgtaaaagataaaatcaaatcgattgacattgcttataaaacattgattagtaaattgaaatctaaatttaaattagaagaattaggtgatgataattttgatagaatatcaaaaaatttttctggaagtggaagtcgtgttccacttgtaactttgatttgatattttactattaatgatttaaagcaaaaatttaatcctaatggtgcaatgtttccgatggttcttgatagtcctaataatgctgaaacagacgaagataagaaaaaagagatatttaaatatattattgaatcatcaaaaaaatttgatcaattaattttttcaacaataggattttcagaagatgactataacattgaaactaatgtaaatattaaagttttaaaaaatgagaaatataaattgttagataaagatacatatgaaaaaaacattgagattttaaatatcactaattttgcttaa

SEQ ID NO: 93190 - DNA, 1047 bp, Mycoplasma hyosynoviae; identical to SEQ ID NO: 93186

SEQ ID NO: 93191 - DNA, 1680 bp, Mycoplasma hyosynoviae; identical to SEQ ID NO: 93187

SEQ ID NO: 93192 - DNA, 1047 bp, Mycoplasma hyosynoviae; identical to SEQ ID NO: 93186

SEQ ID NO: 93193 - DNA, 1680 bp, Mycoplasma hyosynoviae; identical to SEQ ID NO: 93189

SEQ ID NO: 93194 - DNA, 1047 bp, Mycoplasma hyosynoviae; identical to SEQ ID NO: 93186

SEQ ID NO: 93195 - DNA, 1680 bp, Mycoplasma hyosynoviae; identical to SEQ ID NO: 93189

SEQ ID NO: 93196 - DNA, 1047 bp, Mycoplasma hyosynoviae; identical to SEQ ID NO: 93186

SEQ ID NO: 93197 - DNA, 1680 bp, Mycoplasma hyosynoviae; identical to SEQ ID NO: 93189

SEQ ID NO: 93198 - DNA, 1047 bp, Mycoplasma hyosynoviae; identical to SEQ ID NO: 93186

SEQ ID NO: 93199 - DNA, 1680 bp, Mycoplasma hyosynoviae; identical to SEQ ID NO: 93189

SEQ ID NO: 93200 - DNA, 1029 bp, Anaerococcus tetradius
atggataaagaaaagtactatatgaacttgccaaaagatttatctggaagtattgctaaaaatcgctttagattagaattactatggggaattagtaagataatagatgagcataaagcgaataatgaatatacgataatttttgattttaaatgtgatattgaattacataaagatgatgaattggatttttaccaaattaagacgaaaaaaagtggtaattataattcaaataatttatgtaagaaaggcaagaatgagaataattctattttagggaaattatatgctttatattcacctaattacaatataaaattagcaattgtgtgtaataaacaacttaaaattaataataaggaaattgattttcctgagcaatgttttggagatttagatcaggatgtacttgatgatgttaggaaaaagttgtgtacagaattaaatttaaacaccgtgtgtttagataatgtattttatatatttgataacatggatttattaaatccagaggattccattagagggaaattagtaaaatctttcgttgatattaaaggcgaagaacctcaaaatccgaatgcattatatagactggtcgttgattctgttaaagaaaaagcttcttatgaatttgattccggtacttatgaagatgttgtaaaaaataaaggtattacaagaagtgaatttgataaaatgttaaatgcacataaaaaggaatctaaaaatggaatcaatgaaacacaggagtatataaataacctgtcatttgctaagcgaagaagatataatatagcacttggtaatatacttgaaacgcagcaaagtgagtctttacgactaataaaaataaaaatttataattatattgtggaacatgaagactcattagacgatattgaaagctatttaaaagaaatatcgaaattatttgatgacgattttgatgtggaatttaccgatgatatgaaatcagttcaatacataatgatttactatatgtatgcttcaggaggaattttataa

SEQ ID NO: 93201 - DNA, 1683 bp, Anaerococcus tetradius
atgaatgttatatttgataaaatatatatatttgatgttgtaaaaaaagaggcttattcaacagactttaaaaaaggagttaatattattacatcgagtgatatagacggaacagatagaggaaaatcagttttattaaggagcttgtaccacgctttgggtgcggattctcactttgactcgaaatggggagaaaaggataaggtctatattttatcttttaaagtggatgataaagatttttcgatttatagatctcaaaaattatttaaaatatttaatgcaaaaggtgatctaatttttactactattcatagaagtgaattagcagatttttttggaaatttatttaatttttctatatggttaccgcaaaaaaatacaaataaattagtaatagcaccacctgcatatagttttttgctgaattttttagatcaagatgaatacagtggtacaaaatttaattcgtttaaaagtcttgctcagttcagtaattttaaacttaatgttatttactcacatttgggcatttacaataaagaatatttcgaacttgtgaaacacaaagaagaattagaacttgaaattaaaagcaagaaagaagaaatagaagaactaattaaaatgaaagacagaaccaatttaattttggacggtttttcatgtccggaaacaagcagtgccttagaaaatgagcttaatatagaaactcaaaaatattcatcgctgattaatgagatgaattcagtaaggaataagcttgttgacttgagaaatcaattagttgaacagaatatcactttatctcaaatatctaaatttgagaaaaaagaagaaaaggaaataaaaactattttaaaatcaaaagtttgtcctgaatgtcattctgttttagattcaactttggaactaaggagtaagaggtataatcatattgataatgctcttagtctgaaagatgcaataaaaacagaaaatgcccatattgaagatgaaatacttaaaaatgagggcatatattcaaacttgactttggttttggaggagcatgataagaagatttgtaaaaataaaaagggaatcaaagactatatcaagttcagaggactaaataaactaatcgatgatattaataacgatttgattattaatagtagaattatagacagtacaaaggaggctctaaaaccactaaagaaagaatttaaaagtgttaaagataaaatgaaatctgtagatgaaaattactattatttgattgataaattaaaaataagatttaatttaaatgagttagaagctgacagttatgaacaactatctaaaaatttttgcgcaagtggaagcaacaaaccattatcaaccgttatatggtatctaacacttaatgatttaaaacggaaatttaatcctgaaggaacaacatttccaatggtttttgatagccctaataatgcggagacagaccaagagaagaagcaggcattagtcgagtatattatggaatcatcagataaatttagccagttaattgtttcggcaataggattttcagaaaaagattatagcattaattcgaatataaatataaaagttttagaaaatgaaaaatatagtttattaaatagtgagatgtatgttcataattatgagcttttacaatgtatgaacgatgcttaa

SEQ ID NO: 93202 - DNA, 1005 bp, Anaerococcus vaginalis ATCC 51170
atgaatttaccattagatttagcaggtagtagaacgaaaaatagatttagagttgaattgttgtggggagttggtaaattaattgatgcatataagctgtacgatgactatacaattgtgtttgatttcaaatgtgatattgaattgcatcgtgataatggtcttgatttttaccaggtgaaaacaataaatagaggtaatcatagttctaaaacactaactaagagaaaaggaaatagtagatctattttgggaacattgtatgctctttacaacccaaatcataatataaagctggctgtagtttgtaataaacatttgaaaattgatagtaaagaagatttaaggcaagaagtttgtttaggtgagttggacaaaacagtaatagattttattgaagataaattgcaagaagaactaaagttatcagaagtcattcttgataatgttttttatgtatgtgaaagtatggacttaacaaatcctcattatgctttgcttggaaagttaattgaagctttccaagaaataaaaaatgaagaacctaataatcctaatgctttatttcgattagtatctgatacagctcagaaaaaagcttcttatgagatggcaatcactaattataatgatgtactagaattaaaaggaatttctaaaaatgagtttaataaaatgcttgaatctcataggaaaaaatctataacaggcattgaacaggttaaagattatattaaaactttattcccatcagaaagaagattatataatcaagctttaactaatttactggaaattgatcaaagccatgagttgaatgtattaaagatatcaatttttgagtatattgaagggaatatagataagataagaaacgaaaatgatctttttaatattttaaataatgtatttgatagtgaattccctatagaatacacaaaatacatgaaaaaagtattttatttaatggtattttatttatacacagagggaggtgatatttaa

SEQ ID NO: 93203 - DNA, 1695 bp, Anaerococcus vaginalis ATCC 51170
atggatgttattttcaataaaatatatatttttgatattttaactaaagaagcttttgttacatgttttgaaaaaggtttaaatattgttacttctagtaacattgatggaacagatagagggaagtcagtcttgttacgtagtttatatcatactttgggtgctgatgcccacttcgataaaaaatggaaaaatgaagataaagtatatattttagagttttcggttaacgataatatatattttatatatcgccataaaaagttattcaaagtatttaatgatgtttttaagatattatttcaaacatcaactataattgagttatcatattttttaagcaatatttgggattttgaaatatttttaccgaatagaaggactgagaagctggagattgctccaccagcatatacatatgtaatgaattttattgaccaagattattatgatggaacatactttagttcctttaagagattaggacaatatcaaaattttaaacctgatgtaatatatgcacaatttggaatatatgataagaattattttgaacatgttgaaagtaaacaaaatttattggaacgtataaatgattcagaagacgcatacagagaaactagtagaatgaaagaaaaagtatctaaactattaggtaatattgttgtgcctgaaaatttaaaagagcttgaaagggagctttctattagaacaaaggaatatgattatattctgaattctattaataaatttaggtatgagcttacaaatttacgaaatgaaaagtatgagcttgaaattgcattgaaccaaattgaaaggtttaagaataaaaaggaaaaagaaataaagtatattttaaatacagatatatgtcctgaatgccattcagttttgaaagatacaactgatcttagaagtaaaagatacaattcaattgaggattcgttatatataaaggacagcatatatgaggatatagaaaagatttcaaaatcaattttacaaatagagggtagttataaagagtttttagataagttggaatcatacaagaaaaacattggtatagctaagacagaaataaaaaattatagcagctatatggggctaaatgaattatataatagtttaaatttagagttatttaatgagtttaatttgcaaggagaacttaaagagaagctagaaaatattgaggaagacttgaaggaagtatctaaaattaaatcggatatcaataaaaaatattatgatatgattgatagggaagtcttaaagtttggattgaatgagttagaggaagcacaatataaagcaattaatcgagttttttgtgcaagtggaagtaataaaccaatttcaacagttatatggtattttatacttaatgatattaaaaaaatttttaataataaatgcttgaatttacctatggtattagatagccctaagaatgcggagatggattatgataaggcacaatccttaattgaatatatattagataattcatcaaattatacccaattgattttttcatcaattgggtttgaaagaaggaattttgaatttgaaagcgaaataaatattatagagctaaagaatgacaaatatcagttgcttgattctgaaactttctcaaaatataaatatgttttagaaaatgctttaagtgcccaattgattaaatag

SEQ ID NO: 93204 - DNA, 1002 bp, Burkholderia xenovorans LB400
atggtagggggctgcgtgaagaaccagaaaggggatgcgatgtcgacaaccactgccattattgagctatgcgaggttgaggcggacgatgatctccatgaattcggtggtggccacggaaacaaaggcaatgactttgcccgattctggctcatcaatgaaatgctcgccttgaccgaagccggcgagaccgatttccttttcatccttgagtatgttcaggacatcgcgcgtcttgacaaacctcaatcaccagcgacgatcactctttatcagctcaagaagaaggaaggcaacgtctgggatctgaattctcttgctggtttaacggccaaaggcaagcaggttaaagctgattctccattggctaaactattgaaatcggtccttggctttaagacgctggcagcagatgccgagtttgtttctaacacacgattcagagttgaactcgcggcaggtggaacggccctgtcgatggattatgtggcgctttcggagctgactccggaacggcagacacaccttcgcgatagtacggcagcgcgccacggtgttgctaagaccgacattcctttgcaaagaatcggcttgagatacgctcctatcgaggtcaatgacatgcgagttcacgtcattggggcagcgcacgggatgctcaagaagctgagcgcagctcatgccgcgcaggccgactcgttcgtcgatgcgttgttcgcgaagctcgcaacagcatcgcgtaacacgtcgaaatgcaaatcttgggatgagcttatcagcaagcgcgggtacagcaaagcgcagtttggcgacgcgctcgctgaccttcaactactacctgaccagcagaagttgcgtgaggatgttgtgatggagctttcactggcactttcgtggcctacacgcgcccgcatgagaatcgaggtggcgctaactgaacttgcgcgcctgaagctttccggcgggaactcgccctctctgaagtggactggccggcgctga

SEQ ID NO: 93205 - DNA, 1713 bp, Burkholderia xenovorans LB400
atgcaaagcttgcgattcagaagaataagcatctgctcagagaaggagcagaaggcctacagtcagtcgtttcatccaaggaagaacctattcttgggcggcaactcgacagggaagtcgacgatcgtcaaatccctcttccgggcatttgacgcagaacctaccggggatctccgcgggtgggattattcagcgatcgttgcggtcgatttctctgttggtgaaaccgaatacacgactgtacgccgcgccgacttgagggcgctctttcgtggtcagcaactcgttggcgcgaccacgagtagcgcccgatggaatgaaatatttgcttcggcaatcgggttcccgttgcaactgatggaccgggaagataacgtccggtcggcttcgccatcaatgttctttcttccgttctacatcaatcaagacggctcgttttttggtaattgggataccttcaaaagcctcaagcagtttgatgccagcgcaattccgcataccctcgagtatttcgctcaggttcgccctttcaagtacttcgaactcaaggctcgcgagcgaaccgccaagagtaggtacgcggaactggagatagaggtcagcacgctacagcggactcgcttgcgactgaggaggtcggtaaaagcttcgcgtgtgaagctctcaactgccggtttcgaaaaggaagtacatgagctggctaagctggccaccgagctaggggcaaggcaggataaggtgcggagtgacattgtcgagggccaggcgctcgcgcgcgaacttggcgatcagattcgactatccgaggcggcccttcgtgagcatgaggccgacttcaagagcattggcttggcgacggctgatcaaggcacattccggtgtcccacctgtcacgtggagcatgatgcttctttccacacgttcctcgatctggcggaggacgctcgcgaactctaccgcctgaaggagcgtcttcagcaaaatcttgcggcagtcgttgaacggttggcccggtcacgcagggaatctactgcacttcgacagcagtacacggagatctcgaacattctggcagtgaagaaggggcgcctcaccttcgaggatgtagtaaaaagccatggtgccgaccctgcagaaagtgcgctggacgccgagatagcaagcgttcagaaggctgcagcaggtgcaactgaattggcgcgggatctaaaaatcgagttagacggagtgatgaaagatcatgatgccagtgcgccactcgctgtttttcgcgaaaccttcaaggagctgctggttgttgctgacgtggtgggttttacaaatttagactcatggaaactcaacaaacgacctacagattccggtagcccggggccgcgatctgtggtggcctattatggatcactctggactgtcatgaagaacagcgattctaatcttccgagcccggttgtgatcgactcgccgaaccagaacgcgcaggacaggaagcatctggaacgagtgatggggctcctcgcaggaaagacgccggcaaacgcacaggtcattctctgcgcagaagacccaaatgactcatttcagccggatctgacagtggaacttgtgcgggagcgagcactgcttgaatcctcgcaactggatgaggttgcagcccgcttactcccgctggttcagcatgcgattgatgggcttgctcaagtacgcatataa

SEQ ID NO: 93206 - DNA, 987 bp, Burkholderia xenovorans LB400
gtgaagaaccagaaaggggatgcgatgtcgacaaccactgccattattgagctatgcgaggttgaggcggacgatgatctccatgaattcggtggtggccacggaaacaaaggcaatgactttgcccgattctggctcatcaatgaaatgctcgccttgaccgaagccggcgagaccgatttccttttcatccttgagtatgttcaggacatcgcgcgtcttgacaaacctcaatcaccagcgacgatcactctttatcagctcaagaagaaggaaggcaacgtctgggatctgaattctcttgctggtttaacggccaaaggcaagcaggttaaagctgattctccattggctaaactattgaaatcggtccttggctttaagacgctggcagcagatgccgagtttgtttctaacacacgattcagagttgaactcgcggcaggtggaacggccctgtcgatggattatgtggcgctttcggagctgactccggaacggcagacacaccttcgcgatagtacggcagcgcgccacggtgttgctaagaccgacattcctttgcaaagaatcggcttgagatacgctcctatcgaggtcaatgacatgcgagttcacgtcattggggcagcgcacgggatgctcaagaagctgagcgcagctcatgccgcgcaggccgactcgttcgtcgatgcgttgttcgcgaagctcgcaacagcatcgcgtaacacgtcgaaatgcaaatcttgggatgagcttatcagcaagcgcgggtacagcaaagcgcagtttggcgacgcgctcgctgaccttcaactactacctgaccagcagaagttgcgtgaggatgttgtgatggagctttcactggcactttcgtggcctacacgcgcccgcatgagaatcgaggtggcgctaactgaacttgcgcgcctgaagctttccggcgggaactcgccctctctgaagtggactggccggcgctga

SEQ ID NO: 93207 - DNA, 1620 bp, Burkholderia xenovorans LB400
ttgggcggcaactcgacagggaagtcgacgatcgtcaaatccctcttccgggcatttgacgcagaacctaccggggatctccgcgggtgggattattcagcgatcgttgcggtcgatttctctgttggtgaaaccgaatacacgactgtacgccgcgccgacttgagggcgctctttcgtggtcagcaactcgttggcgcgaccacgagtagcgcccgatggaatgaaatatttgcttcggcaatcgggttcccgttgcaactgatggaccgggaagataacgtccggtcggcttcgccatcaatgttctttcttccgttctacatcaatcaagacggctcgttttttggtaattgggataccttcaaaagcctcaagcagtttgatgccagcgcaattccgcataccctcgagtatttcgctcaggttcgccctttcaagtacttcgaactcaaggctcgcgagcgaaccgccaagagtaggtacgcggaactggagatagaggtcagcacgctacagcggactcgcttgcgactgaggaggtcggtaaaagcttcgcgtgtgaagctctcaactgccggtttcgaaaaggaagtacatgagctggctaagctggccaccgagctaggggcaaggcaggataaggtgcggagtgacattgtcgagggccaggcgctcgcgcgcgaacttggcgatcagattcgactatccgaggcggcccttcgtgagcatgaggccgacttcaagagcattggcttggcgacggctgatcaaggcacattccggtgtcccacctgtcacgtggagcatgatgcttctttccacacgttcctcgatctggcggaggacgctcgcgaactctaccgcctgaaggagcgtcttcagcaaaatcttgcggcagtcgttgaacggttggcccggtcacgcagggaatctactgcacttcgacagcagtacacggagatctcgaacattctggcagtgaagaaggggcgcctcaccttcgaggatgtagtaaaaagccatggtgccgaccctgcagaaagtgcgctggacgccgagatagcaagcgttcagaaggctgcagcaggtgcaactgaattggcgcgggatctaaaaatcgagttagacggagtgatgaaagatcatgatgccagtgcgccactcgctgtttttcgcgaaaccttcaaggagctgctggttgttgctgacgtggtgggttttacaaatttagactcatggaaactcaacaaacgacctacagattccggtagcccggggccgcgatctgtggtggcctattatggatcactctggactgtcatgaagaacagcgattctaatcttccgagcccggttgtgatcgactcgccgaaccagaacgcgcaggacaggaagcatctggaacgagtgatggggctcctcgcaggaaagacgccggcaaacgcacaggtcattctctgcgcagaagacccaaatgactcatttcagccggatctgacagtggaacttgtgcgggagcgagcactgcttgaatcctcgcaactggatgaggttgcagcccgcttactcccgctggttcagcatgcgattgatgggcttgctcaagtacgcatataa

SEQ ID NO: 93208 - DNA, 1125 bp, Photobacterium damselae subsp. damselae CIP 102761
atgcatatagttactgatatcaatttaaaacctaattttgcacaagcagacaaacaagatgaagatgccggtgctttaacatttgctaaatattggtaccaatacaattgggctttgttacatctattcaatcaaatgcctaattttaataattgttctattacaatggaaactcatgaagatgtaatgtttatttcaaatatcgattataacgagactaaaatagatttatttcaagtcaaggagcgttcaaaatcaggaaatataacatctaatgttatttgtagaggatcaaaagataaacctgcgataatatcaaaaataattaagaacatcacaaaggaaagattagtaaaacggttgaattctatagctcttgtatcatctactgattattcatttaaattaaaaaatgaagatgataaaatatcatcatatcattcagtaaatttcaatcatttatctgatgaggttaaaaatgaaataaaaaaggctgtacttcgtgatttagatatttcagaaataccaaacttcctttattttataagaggaatgcaaacaacatctaaagatgaaagtacattattaatcatagggataattgctaaatatatcgatagtatagatcctaattcatcatcaaaaccaaagttaatctatgatgcaataacaactgaattactgaaaattggatgcagtacattaaaatataataattgggatgactttgttaaaaataaaaccattacaaaaaagcaaatagaaaaaattatacaaagaagaacaacaagagaaggatttactgattttgaatcagtttggataaaaatcacaaatgaaatgagtaatgatgctaactatgcaaaactcccaataaaatccaaatcaaaaatgaagaaaaaagtaagagaatattatggattaaaaatgactcaaacgaatttgatgtttgactcttttagcgaaaaagtcaatgaactattcgaattaagctctaaagaagatttatatgaaattattatcgatataaaatccaatctattaaaagatgaaaaatatagtgatatctttaatgaggaattactagaacccgcaatattgttagaaataagtgaaaacatatga

SEQ ID NO: 93209 - DNA, 1686 bp, Photobacterium damselae subsp. damselae CIP 102761
atgaaaaaaatagtatttcaacaattatcgctaatatcagatttagaaaagtcagcaaacatatttcagttctctcagaaaaagaatttgattctaggttcaaagaataatgttggaaaaacatgtttaagcacatctatattttgggctttaggtatagatcttaaacaacctaagtcatggaaagatttaggtgttagaaccgtaattaaatttactgttgggtgtgatacctatcatatatcaagaaaagaaaaatcatttgtaatacactaccctaattacaataaatcttattttgattcactaaaaagctttagtattgcatttgcaaatattataaactttaaagcatgtataaaagaaaaatctgcttcatcaccaacggtaccctataccgcgattcaacttatttgctcttatattcatcaagatacaggatggtctgaattatttaaatcattcaacctttattattatcataaaaatgaaatatcaaaagctattgattattttgttgggctaaaaccagatgagtactttaaacctcaactagaagagctacctataacaagagaaataaccaaattaacacaaaaaatagacaatatatccttcactaaagaagctatatctgtttttaacaaagataatacagaactatttaatccatttgaaaactataaacatataaaagaaaacaaacaacttaatgctctattatataatgaaactgaaataaaagaattattactaatacaaaaaaaagaacgctttgctcttaaagaagaaattaaaataattgaatctgcctgtactgaactttttaaagactaccaatttgccacaaataatattgaagaccagatcattcaatgtccaacttgtggaacagagcatgaaaataatgttgtagctcgtttcaatattattgatgacagagataaattgatcacttgtaaaacaaacgcattaaatcaactttatatattaaatgaggagatcgataacaataaacgtcgattaaatttaattaaaaatgaaatattaatgtttgaacgttttcataacttaccttcattaattgaagataaactattaaatgataatataaacatttttgacaatgcaattaagctcacatttgacaagataatagcatcatcaaagttagaaatagacacattaaaaacaaaaaaagaatcaatcaaaaaattttcaaataataaagaacaaaaagaaaggtataaaaatattgttaatgagtttaatgataaattattaacaaatttcaaaaaactaaatatagaagacgcccaagtcctatatgacaaaaaaataatatactcctttgatgtaagtggtagtgatatatctcgctctatactttcttattataaaaccctaaatgatatgatgaaagaacattgtagtgtttattcacttccttttgttattgatacaccataccaacaagaacaagataatataaatattgattatataaataattttctcaatgactgggacgaacaacaactactaatatttggtgttaacaataaaaactaccaatcacttattgacaataaagacagtaatgtaattatgttgactaacaaaaaatctttattatctgtagacatgtataataaaataacgcaagagttcaacatctatttttaa

SEQ ID NO: 93210 - DNA, 1089 bp, Gluconobacter frateurii M-2
ttgccaaagcccacgttaaagacggtagcatcgaaacagccgcgcgaaaccgccggcccatccgcgttcagagcctttgactttcaggtgaacgtgtcgatagcgctggttctcgacatcttcaagcaaggcaaggaattcgtcgccctgttcgatcatcacgacgatctcgtcgtttttgttggagaaggtgagaactcagagctttcattctatcaagtgaaatcgagtagcgaactgacttggaccgccaagaggctcgctaggcgaagcccgaagggtgaactgccgaaatccattatcggcaaggcctactataatattgcacagttcggcccagaaattcgccgagcatcaatattgtcgaaccgaccactgaacgcaaccttggctacggccacccaatctggtctccacgatggcgagctttcgatcgccgatctctgctccgctgatcagaaagcaataatgaagtcgctagaggaggatttccctagcggtttcgacaagaggcacgcgacgcttctaactttcgagcgtgttccattcgatctggaaagctatcgcgccacggtgcttggcaggatcgtaacgatgctagaagaactcgatccggattttgtagccgtctccagccctttctatacgactctccttgctgccgcgggtgaatgtaccggcaacaagaccaagtcgacgactgtcgaagaattgcgtaagcgtgttgctttggaccgggaagcgatcaaccgcctgatcgtacgggttcagagcaggcggaaaaatcttgtcgaatggtggtctagcgtgaaagacgaattcgctgccgatggaatgaaagcgatacaaatccagcgtattaagaacatgtgcatagcgtatgttgatgcccgtcgcgttggaaacagggcagccaccaatctgagcgaagcgatccgcggctcaatcgataagactgcagtgagcacgatcgagagcgtaaaggaggcggccgtagccttgagagcccacggcctcgttgagcccacatcagagccctacgatctccagtccgcgatgatcgtcgaattgatggaagccatgacatga

SEQ ID NO: 93211 - DNA, 1569 bp, Gluconobacter frateurii M-2
atgaagagcttgtacgagactttaggagcgacgccgaacaagattgacgaccgctggaagaaagccaacgtatcgagttgcctcgaatttgagttcgcgggtgcgatctggttttcggtaaaggcccatggagtgctttcgctcttcgatgacaagggcaacagacagttctgggggctgcgactggtcaaggattgggggccaaagcttgccgagttcttcggcttcaagctggagatggtggacaaggatggggaaacattaacgccgccgcccgcgtatctgttcgcaccgttctacattgatcaagatggaagctgggacaatacttgggtctccttccgccaggacttctacctgccagaaagtgcgcgcacgcttgcggattatcattcaggcatacggccggatggctactatgccgccaaggccgaacttacgaaggagaagatcgtcctttccagcttggagactgctgtcgacacgcttcgccaggcgatgacccagattgaagagatcgaaggcacgaccccaatctacgacttgcaggaatttgccagcgagtgcgatgatcttgttgcggaaagtgagagtcttcttgtgctgcaggcgagacatcgtcggacgatatccgaccttcatgaggaatctcatcttgtcagggctgaagtggctctcctcaggaatactctgaacgaaatgcgaggtgagttcgacctcgcgtcctcgttaccacatcaggttgagtgccccacctgcgggtacgagtaccagaactcccttactgaaaggttcgccttgatcgaggatgagggcgtcttgtcgaaggcgctgactgaggcgaagtataaactgggaagacttaccgaaaaggaactggccgagcgaggaaagcttgacgagatcagtgcaagcctgacacgcgtccaaaagattctcgaaacggaaaaacagtcgctgtccctcaatgacgtgctcgtcgcggccggcaaaaccgaagccgccaagcttctccgggtatcgctgaacgagaagattgtggcggcggaaggttccagaaataaaaccgagcttctgcgcgcttcgatgagtaagttcaccgagagaacgcgcaccacagagatcatgaaattttatcgctcccgactgtcgatgtattcgcaggaactggacgtccatctcgacgcaccggaaaagcagtcaatcatttccatcaacgttgcgcgaggaagcgagggaccgcgggctttattggcatactattatgcgtttctttacacgaagattaaattcacgacgagcataagattccctgtcgtgattgactccccgaaccagcaaggtcaggacaaagttcaccttcctcagatgttgaagttcattttcgatcacgttcccgacgacgtgcagaccatcgttgctaccgaggacgcttcagggcttaaattcgaaggggtcgccatcgccaattatggcgaagccaagcgccaaattcttcgtgaaaacgaatttgatcgggttaagaacatcttcgacccattcttccaaaagatactggctgcagaataa

SEQ ID NO: 93212 - DNA, 1071 bp, Pseudoalteromonas luteoviolacea 2ta16
atggagttagctaaaagtcttattgatgtacctcaaacagaaagaggcggagaaatagctcaaagaggatttgactttcaagcctgttgggcactttctcatatgtttgaatatgaactacaaggtaaggaatatgtttttgtttttgaatatcatgacgacgtacttattcttgattctgaaaactttccaaaaaaagctacgtttgctcaagttaaaactaatgagaaaccttggacattaagtaaattaatttcggcaacaaagaaaaagcctatttcatttattggaaagttatttgaacaaaagaataagttcaataattcagatgttgaattaatgtttgtttctaatgcttattttagttttgataataggaatacgttcaaggctgatgagctcaaaccagaggatcaagatgctttaataagcaaagtatctaatcaattatctagtaaggaagctttagaactctcaaaattaacattcttaacatctgatttgagtttagaagaccactctgttcatttaaaaggtaaaatttgtgacttttttgagagctatttcaacgataatcttgaaattaatccagcatcttttgctagaactctagaaagtgcatgcagagacagagcgaaagtaagatcatcagatattcgaagcttcgatgaactaatcagaaggaaaggttttacttctacatttgtaaaagaaacgcttaataatatttgtgcaacaaagatcttacaacctgattgggaaaatgcacgtgcgatattcgctgatatggggaaaaatcatattcagttactttcattgcagtcgacatttacgcgtataagcatctcagtaaagtcatctacaagtgttgagaaactgtacttggaaaaagcagacttgttattcgacaaacaagctgtagaagcatcgatgattgcgtatatcgccgaatcaattaaatcattagaaataactcttcctgattactctttggctcttactgaacctaagaaagaatgcatcattgtttattcagtaattaaaaatatcataggaggcgaggaattatga

SEQ ID NO: 93213 - DNA, 1641 bp, Pseudoalteromonas luteoviolacea 2ta16
atgagcctcatacattttaaagatatatcgattctttctcgaagagataaaaaaggttttagctttgagttttcacctactgtaaatatgatctttggtgataatgatacaggtaaatcgagtttgattaaggcgctatacttcacgcttggcggcgattgtcggattgataaagattggaaagatgatgatattattacaaaagtttgcataagcgttaaagggaaaagttatacatttgtcaggcataacaagaggatttcaatattctcaaattcagacgatacgaagccaatagtaacatcgagccacatgagcgctattgctgataaagttcgggaaattttcgattttaatttacagctatcttacaaaaaaacaggcaaacaaagccaagctaatccagcatgtctatacctgcctttttatatcgatcaagataatggttggcacaccgttttatcatcatttttaggtttagcgatgtatgatgattggcaaaaaaactctttacagtttcattcagggatgaagccaaaagaatattatgaattggtaggtgaaatcaaaacaatacagctcgaacttgaagaacttagtgcaacacttacagtagttcttgcagctaagaagagatttgaagagtcgtttggcagagtattatttgatatagatattgaatactatcaagatttgctgaataaatttttagcaaaatgtcaggaactcaatgaagaagaatcagagtttagattaaaactattaagcttactttctaatagagattctatagcaaatgaaattgacatatgcagaggtctcatagaaaactttgatgattatacaactaatgacgcagcagaaaaatatcacatgtttgaaaatagggagcaaattttagaaattcttcctcaaatgtatgatgagaagcaaggtttagatgaccaaataaactcaatcaaagaagagttgcgccagtcacaaacattaagttcagaactaaactcaatgatgaaagaggttagaggtgaattgacattacaggatgtaataaagtctcaagcaagtaaagaagtagagtttacttttgatgaacaaataaaaagccttcatgaaaaaattggttctaaaacgactgctttagaagcgttaattaaacgtcaaaatgagtttactgataaaaaacgcacgcaaagtataaacgatgatttcaaatcttatctatcgatggcgcaggaaaagttgggcataggctcgcctattattgctcccttaattcagtatgggaaaatcacaaagagcaagacaggtagtagaagcccaagatctatttttgcttatcattatgggctactaaaaactatggaaaaacactcttctgtaaacatgctacctattgtaattgattctcctaaacagcaagatcttgatacggaaggtaccgagaagctaattgctttatgtacagaagatttagggagaaataatcaagtaattattggcgctgtatcactagaaagtaatatgcatggttaccatcaaattgagcttacagaaaagtatagtttattgaagttagatgattatgaagaggcttataaaaaaataatgcctttttatgaaaaaggtatgtgctattaa

SEQ ID NO: 93214 - DNA, 1083 bp, Pseudoalteromonas rubra
atgagtgccaatgatgcagaggaaaatgtcgttgataaccctctagcgcaagatgcccagagggagaagagtggtagcgacactcacaggaaatataattaccaataccattgggctttatgccgaattctggaggcgcatgagaataatgatgaatatgcgttattcgtagagtgccacgatgatgtagttataactgattctttaaactctctaaccgcagagtttgagtttaatcaagtaaaagagacatccacaaaacatacagcaagtagtttattctataaatcgggaaaaaactcagttttagctaagttattgctggattcctgcggtaaatctttctcagatagaataaaaaatatcaacctcgtgtctacgggtggctttgatttaaaaataaaagagaaagatctaaaattagatgtgattaagttagggtatcttgctgatacagagatagagcttatcaaagaaaagttatctaaagagcttccgggtatagcacttcctgataaattagctttcgttttacctgacctgccaaataaaagttttcgagatacagtaaaaggaagaattctaaacttgcttgaaaagctatctccaggtagtcataatgatactggatctatatacaggttgttggttgaagatcttgatcaaaaaggcgaagatacttttgattaccttgagtgggaacgagcgttaaagcgaaaagcgataaccagtactcaagtacaagatattattgagcgtaatataaaacgcacgatagatagtgatttaacatcttcactaagtgacgtgttaaaagaatatggttttaaatccttgagagttcgaagcattaagcatgcatttcagaggtattacaatagacggttaggcacaaggaatactcaactaataaagctttctaagtttatagacgaatttgaattgttacatcaagatgaatttgaagaagtatcagaactggaaatggctattcgtagtgatttaccagaatatttgaagcaggaattcaatgatgagaacgagttaattgccgctgtactttatgagttattaagtgagtga

SEQ ID NO: 93215 - DNA, 306 bp, Pseudoalteromonas rubra
atgaagagcttgatattcaaaaagctaatgattctgtcagaacaggaacaaaaaggggttcatctaacattcgacaggataaacgtagtaatagggagtgataacagcgttggcaaatctaccttagtaaaaaacctattctgggcattaggatgtaacccctattttgacgataattggaaaggtacagaaagtaagactgttatcgagttttcagtaaatgataaggtttatctttgtgctcgtgatacatctagaattatgattggggaaaaggtaaacagcttaccatatacactagcttga

SEQ ID NO: 93216 - DNA, 684 bp, Mycoplasma conjunctivae
gtggataaaacatcaggtagtataacttataatagattgcgatttcaaattgcacaatctatgttatttataatcgatttttatgataatttagaagattttatactaactttagactattttgatgatataactttttttgataacgaagaaatggatggttctgtaagctactttcaattaaaaacaaatgagcaagttactattacatacatcattaagaaagggtggattagcaaattatataagcatttaaaatcagataataaagacaatgtttctaaaatatcattgattgtgtcatcaaatataaaagataaacagaaaaaaatagttgaatatggagaaaagaaatttggtgatttgcctcaaaatgttaaggaagaaataataaaaagcatagctactaattataagtgtaatgaatctgaagttgatttatccaaattttctataattaaaactgttttaacaaaagatacatactttcaattggcagaaaacaaattaacaacttttctagaaaagataaatccagatatcaccttaagaacaagtaaattaatttttaattctctttgagcatggatggattcaaaacaagcttttgaatttccacctggtagtgttgttagttatgatgaggtacgtagtaaaaaaaagtatttcaaaaaaagattttaa

SEQ ID NO: 93217 - DNA, 1680 bp, Mycoplasma conjunctivae
atgaaaaaattttgtattacaagaatagaaatatatgatgtcattgaaaatgaagctttttttaccaattttacaaaaggcataaatgtagttactggtagagataatcatgtagggaaatcatctttgctaaagtctatttattactcatttggttgcaatgttgattatgattctgcctgagataaaaaaagtaaattggtttctgtaaacttcatgttagataataaactatataaaattagtaggttagataataaatacttgttacaggattcagaaggacaaattttattaagaacaaaagaagtaagtaagaaattagctccatttttatcggagctttttgagatggaaatttatttaacaaataaagataaaaaagttgaattggcaccacctgtatttttcttcttgccatattacattgatcaagataaaggatggtctaatgaaccatttaatagttttttaaatcttgatcaatttaaaaaaacagagagattaaaatgcctatattatcatcttggtctttataataaagagactttcaaattgactaatgaaatagaaaacctaaaggataaaaaaattcgatttgaacacttaaatacaaaatatacagattttaaagaaattcttgaagatgaaatagaagtactagaagttctaaataataatgagttgtataaaagtttggatgaattaagaaataatattactgagaaactagttaagttagatgaagtgaaaaataaaataaatatttctaaatcaacactatctaatttagaatataatttagaaatattaaaaaataattttaaacatcaagataatataaactttattacttgtccgagatgtggtttcacaaaacgtaaatcatttccatataaaattgaaaatattattattggtgaattttctaggcacaatacagaattttctatatatgaattaaataaaatgatagatgaacagaaaaaaaatattaatgattatacagatatttatacagatttatatactgaaatatctataaaaaaacagaaagtagaaaataatgatgtttttacaaaatttattaatggtaaaggaagagaaaatataaaactagattttgataaaaagatagctaataatgcaattcaaataaatgacttaaaaactgaaataagatctaagaaaaaatatttaaatgaaaaaaaagatccaaaacaattaaatgaatgatacgaaaaagaagtaaaaaattttttacacgggttgaatgcttgagatgaaagagcttctagtaagatcactttaattaaaccgtttaaagggcaaggaaacctagcagttaaatcaatagttgcatcttatttatcattgtttaaagtaatggaaatttctaatactaaagtaacaaaatttacttttattgttgattcaccaagaaccaaggaagctagtgagaatagtagtatcgaaatattatctaaaataactgatatttctaatttggaacaagttattattgcgactgtagattttgatttttatagtggtgatattaaatctgatgttaataaaatagtactcaaggatcaaaagcatttattgaataaaactttttatactgaactaaataatggtgaatttatcaagtttatgaaaaactctaaaaattggtag

SEQ ID NO: 93218 - DNA, 867 bp, Pseudomonas amygdali pv. lachrymans str. M302278
gacaaaacaatgcatgaaataatcgacaaaataatcacccttggagccgtactaaaatctgacccgaacgtattacaccccgaatactggcacaaattaaacttcctaacgaatgccgccatatcttttaatgatggtgccaagaaagaaagaaaatcaatcctagtcaatgaagccaacattaaactagaatataaaagcatagatgaaaaaatccaaaaaaatataaaaaaactagtgaagaacttcaacagcaaagctgacatcaactttcccgaactcgatttctttgcgctaaactatatcgacctccccaaaacttacaaggctcaaaaagaagctctaattggtcttttcgaaaacacttttggctatagcgttaaagatcataaggcggctatcgaaactcttttaagcatgttcagggatattgagctaaagttcaatcaaggaaatatcccaagtttgaccgctaaggagaagcagctatgcggcaaccatataaaaaatgcatttaatattatcactagcaaacagaaggcttacgatttttggcgagctgaaggtaaagaactttgcaagctgataaaaatttccgtttatgatcaacgcaaccacgagtttttgctgagcaactgcttcgattactttaaggatctcacgcaattcgagcaccaaaaaatattacagttcgtatcgtcccaaacgcttgatacacacaaatacttcgacgaattaagttatatcgagcatcttttcaaaaaattcaaagcaagccacagcaaccagcttacggaaaccgaagtaaaatttgcaataattgccgcatacgtcgaaacgagagagccaaatgaaaacgacatttaa

SEQ ID NO: 93219 - DNA, 1728 bp, Pseudomonas amygdali pv. lachrymans str. M302278
atgaaaacgacatttaaatttgatagcttctttggctactccgagactaacaataaatattttcacaccatcttccaccctcacataaatataattcaaggtccaaacacatctggaaaaagtacattcttccagctgctgctatttacttttggcattaacgacaacaacgagcaactttcggacatattgaaagaagacgctttttttagattagactgcacaataagtcacgaccaaaaatctgagaaaattacttttatacgtgacggcgacaccctagtaattaagccagactcaaagccattactacggtttcatggtataagcgcaaaccactctgctgagcatatcaagctaaaggctattctacatgagatttttggctttgatctgtatctagaaagcaagggagaatacaaagcagctcctattgaagcaatttttcttccctactacgtcgcacagtccgtgggatgggtatatctccgaaaatctttttccgccttagattattatcgaaacctaaaagaggattacctagattactacctaggaataactagtcacggcgaccgcgtagcaaaacagactcttgagtcagagaaaatgtcaataattcagaaaattacatttttaagaagtctagaaaacaacgatattgatattcagatcacgaaacttactgacgagtcttttttggaagaatcaaagaattacatcagtaattatgtcgaaaggcaatcctccctagccatgaatgagaaaaattacatttctcactgcaacactctttcacagttatctgcgcggaagtccgtactagcaaaagtcagaagaaacagtgagaaacaatccccggcactcgacacttgccctacttgctcgcagagacttccagcttcattagaggatgtatatagccaccagcaagccgttaacgacactatcattgagcaagttaaggtaaaagagaatcttaaggaaatccagggcaaaatcaactccctaaaaaaaattatttcaacggcaaaagatcgcttatcatttgaatacgagattttaaaaaaagtttcagcacaaaatataaactttgaaacttggattcagcataaggctactgccagattaactaccgaaataaaaaccaagactatagcattaaccgaacgtctaaccgtgatcaacagtgcgttggccggatataatacagatgaaagcatcatcgcagagagagcaaacaaggaaaatcaattcagaagaatatttgttaaatatctcgatgaattaaatgttttgatacctacagacaaacgctacttggacctttacaaaatatcagcattcccaacccaaggtgtagagttacataaaaccgtcatggcatatcatcttgctataaataaaatctttgaaagtaataaaacaactcatagactcccccttatactcgacgccatattcaaagaagatatcgaccctataaataaaaataacatcgtacagtttctttcaaaaaacaggcctaaagacactcaattattcatatcaatggcccaacttaacaacttaaatacaccgtcctctacaggacaagacttctcaaacgcaaactcaaagaaaattatgattggagatgacgccactaaacgttcactatttaaaaaatatacaggcgaactaaaaaaccaccttgacgaaacttttagcttgctgaatttcacatag

SEQ ID NO: 93220 - DNA, 1203 bp, Pseudomonas synxantha
gtgccatccttggtggcgaaagtgcatagggaggatgccttgtccatatcggctggtgccgcagagttacttctcgtcgcgaacaaaccaggtctcactgagacaggtggagggcatggtgctaagggcgtggactttcagcgctggtgggcggtgctccgaatggtggaaatggagcgggcgaacgaaccggacttcttgctccttttcgagacagtgcaagatgtcacggaactaaactcagtaaatactcctacgcgcgctcgtgtttatcaggtgaaaaagaaggaccgtggagagtggacgtggtccgttctcactgggacaacggcgcctcctaagaaaaagagctcgacaactgcatcaaaggcagtaacacccacatttacaaaggtcagtgacagtgcactaggaaagcttcagctcagtcttgcagccttcaataaactgcccgtcgaggcctacttcatttcaaatgctggatgtgacattcccctcgctgccggaggaaatgctgcaacgtcaatgccttgctcactggcagatttcgcccctgagcattcgcaattgttggctcaagctctgcattcgcttagtgctgatggctcacctgttccagacttgacgaagctcaaactgaagagagtcgccatccaccctgatgagcccagcagttacgtcatcaagtccgctctggagctattgacgcagcggagccctcctcatgcgggccaagccgcatcgttcgtagaatccctcgttactaagatttctcctctaggtcgccacactgatacttgctcatctttcggcgatctcgttaagcagcgagggttcgcaaggcacgagtttatctctgcgctgggtgcgctcgagaccattccagatcactctgcatatctgaatgactggctcacgcaactgcagagcgaaggaatggatttcatggtggtgactgcaatgcgtgcggaggcggcccgagttgtgcgtgagcaactcacaggcgcgacgctgcctgttgttcaatctcttcatgatttttgtgatgtctggctcgacgccaatgcgcgcgggttgggcctgcgaccgtatttcgaggcggggttagctgcgctgagacaggatttcagcagctttcgtgatgccgaacttctagcgcgctttgcgatgagggctattaagaaatgcgtggacccgaactga

SEQ ID NO: 93221 - DNA, 1731 bp, Pseudomonas synxantha
atgaaaagcttccgattcgaaaacatctggctgctctcgcatcgcgacaggaaggcgaggcacgtgaacttccacccgaagaagaatttgttgagggggaggaatcacacgggcaagacgagtctgattcgcagtctctttgagactcttggtgccaagcctcaggggaagctggaatcatgggacgacaacacggcatcactccttgaattctctatcgacgggcgtcacttcttcgcgcttcaccagaacgggcggcgtgcgttgttcaacatcaatcgagagatgattgtcgccacctcgaaatttggagagtggtctcaggccttctgtgacgtcactgatttcaacctagtgttcactgacaagaaggagtcagagattcggccggcggaccctgcgtgcttcttcttgcctttctatgtaaatcaggacggcagttggcagtctgagtggaacacctttggcgggctcaaaagattcagctccccctggagcgccattctggagtacttcactggtgtgtgtccgcctgagtactaccgtgctagagcagagagggttcaagagtccaaggttcttgaggagcatcggcgcgagtacaaactccttgaacgtactatagagcgctttagccgtacgctgcccttatccggtcccaagctcaaccctgagaactttgcagatgagatcgatctgctgacccaagaggtcaatgagctgaatcagcggcaggagatgctacgaagtgctgctgtccgcgagcaagacttgctttccagtttggagcaacagattcggctggccgatgatgctctcgcggcttatgaccacgatgccaagtatctgcgcactggagattctgagccgctggtttgcccaacttgcaacgccgagcacaccaagtcattcctagatctgctcaatttcgctgaggacgcgcgtgtactacgtgaactcgctggacgccttagggatgacgcaaacgaagtacggcatcgatgcagaaccgcgttggccgaactcagcacacttaacgagaactatcagcgcatctccacgttgttgggtacgagcaaaggcgagctcaagttccaggacgtcgttggtagcatgggcgcagaaagtgcgttcgcggcgttcgaagccgagcgtaagctgctgcaagaggcgatcaacaaggctctaggtgcggtcgattcattagatgaaaagatgaagtcgctgcgcgccgtgaaaagaacgcgggcgatcttggaagacttcagatcctactacgtgaccggtcgtgttgcgctgcagctcccccctgtggacgcatcaaagatgaagctcaccagccgtccagacctatccggaagcggcggacctcggtcgattttggcctactacgccgcattgtggcgaacgtgccaaggtgtgaccggtacgtacgatataccagtcgtcattgactcgccgaaccagcaggctcaagacgatattaatcttcccgctgtgcttcagttcatcgctaaagagttgccggaggacatgcagctaattgttggactggagactccaacggacttccccttcgatagagagatacacttggacgtgaagtactcgatgcttcgtgaagactactgggacgaggcggagcgcatcattgagccactgctcaagaagatgtacgcaacgatgaaatccgatgtcgaggagtccagcgacgatgtgtcggagcaatga

SEQ ID NO: 93222 - DNA, 1086 bp, Acinetobacter sp. SH024; identical to SEQ ID NO: 92398

SEQ ID NO: 93223 - DNA, 1560 bp, Acinetobacter sp. SH024
ttgataacgacaaaaggtaatacaattggtaaatctacattattgaattgtttattctgggctctaggttgtgaagttcgtttcgaagaagattggcccgagcttgacacagttgttttaattgagttttcaattaataataaaatttataaagtcaaaagagattctcaagctattcatctacaggaagatgatgaacaatgggcaacctatgaaaaaataactggttcttatttagatagattaaattctattttaaatttcaatgttttattaaaaaattctaaagcaaaaaaactttctaaagtccctccagctttctattttgcatctacttatattgaacaaatgagtgggtggaatgaaatttggaattcatttaacaaccttggacaatttgataaaaataacaagtttgaactctccaaatatttatgtggagtattaaataaaaattactacgataacaaacttaatcaaaacttttatgaattaaaaaattttgatatctctaaagaaatcctaaaaaccaatgaagtatcagactactttagatctaaaagagctattagcccccaaatagatcttcaagataaaattaaaaactctgccagatcagtagtaatggctgaaagaaaaattttagaaaagaaaaacgagtatataaacatatcttccagaatggcagctatagataatgaattacaaattattcaagttgctattggagagattgagcaagactataactattctattgaaaatattgagactacttcaattttttgtccgacttgtggtgttgaacataaaaatgatttagtcaatagattctccttgattcatgatcaaaatagattaatggagcaaataaaaaatttacaaaatgaaaagtcagttttaattaacaaaagttataatttgactaattctatagatagcttttatcaagaaattgaaggtgctttcaaagaggaaagtttcaatgaagatattaatcagttatttattagcaaatctcttattcctggcttagaagaaaaagttgcctcagataacagagaatttagagcaaatacgaaagagataagaaaaataagaaatgaaaataaaattattgagaattcaaatttagaagaaattgaaaaagatgttgttgaatatttcaattcattatgtactgacttaaatattaaaatgtatttaaaacataatttatacgatatactcaactactatagtggtggtgctaatcaagttaaagcaatgttagcgaaaaggcttactatccttaattctatctactctcatgctgagttatctactcctccatttattattgactctccacgacagcaagatattgattctgataattatcataatatgcttaatattttaattagtaatacacctgacgatgtacagttaattattgcggcagtgcaaaataactttattgacagcattaaaggaaattttgaagaaattaacctcgaatcaacacttttaactgcagaagagtatgaacttgccaatttcttaatctcacatagttaa

SEQ ID NO: 93224 - DNA, 1086 bp, Acinetobacter pittii; identical to SEQ ID NO: 92398

SEQ ID NO: 93225 - DNA, 1077 bp, Acinetobacter pittii
atgaaaaataccagcaactcttttcaatttcagaaaataattattgtatctcgaacagaaaagtcaggtcgagttttaaagatatttccaaggacattgataacgacaaaaggtaatacaattggtaaatctacattattgaattgtttattctgggctctaggttgtgaagttcgtttcgaagaagattggcccgagcttgacacagttgttttaattgagttttcaattaataataaaatttataaagtcaaaagagattctcaagctattcatctacaggaagatgatgaacaatgggcaacctatgaaaaaataactggttcttatttagatagattaaattctattttaaatttcaatgttttattaaaaaattctaaagcaaaaaaactttctaaagtccctccagctttctattttgcatctacttatattgaacaaatgagtgggtggaatgaaatttggaattcatttaacaaccttggacaatttgataaaaataacaagtttgaactctccaaatatttatgtggagtattaaataaaaattactacgataacaaacttaatcaaaacttttatgaattaaaaaattttgatatctctaaagaaatcctaaaaaccaatgaagtatcagactactttagatctaaaagagctattagcccccaaatagatcttcaagataaaattaaaaactctgccagatcagtagtaatggctgaaagaaaaattttagaaaagaaaaacgagtatataaacatatcttccagaatggcagctatagataatgaattacaaattattcaagttgctattggagagattgagcaagactataactattctattgaaaatattgagactacttcaattttttgtccgacttgtggtgttgaacataaaaatgatttagtcaatagattctccttgattcatgatcaaaatagattaatggagcaaataaaaaatttacaaaatgaaaagtcagttttaattaacaaaagttataatttgactaattctatagatagcttttatcaagaaattgaaggtgggcgaattcaaacatga

SEQ ID NO: 93226 - DNA, 1086 bp, Acinetobacter pittii; identical to SEQ ID NO: 92398

SEQ ID NO: 93227 - DNA, 699 bp, Acinetobacter pittii
atggagcaaataaaaaatttacaaaatgaaaagtcagttttaattaacaaaagttataatttgactaattctatagatagcttttatcaagaaattgaaggtgctttcaaagaggaaagtttcaatgaagatattaatcagttatttattagcaaatctcttattcctggcttagaagaaaaagttgcctcagataacagagaatttagagcaaatacgaaagagataagaaaaataagaaatgaaaataaaattattgagaattcaaatttagaagaaattgaaaaagatgttgttgaatatttcaattcattatgtactgacttaaatattaaaatgtatttaaaacataatttatacgatatactcaactactatagtggtggtgctaatcaagttaaagcaatgttagcgaaaaggcttactatccttaattctatctactctcatgctgagttatctactcctccatttattattgactctccacgacagcaagatattgaatctgataattatcataatatgcttaatattttaattagtaatacacctgacgatgtacagttaattattgcggcagtgcaaaataactttattgacagcattaaaggaaattttgaagaaattaacctcgaatcaacacttttaactgcagaagagtatgaacttgccaatttcttaatctcacatagttaa

SEQ ID NO: 93228 - DNA, 1086 bp, Acinetobacter pittii; identical to SEQ ID NO: 92398

SEQ ID NO: 93229 - DNA, 699 bp, Acinetobacter pittii
atggagcaaataaaaaatttacaaaatgaaaagtcagttttaattaacaaaagttataatttgactaattctatagatagcttttatcaagaaattgaaggtgctttcaaagaggaaagtttcaatgaagatattaatcagttatttattagcaaatctcttattcctggcttagaagaaaaagttgcctcagataacagagaatttagagcaaatacgaaagagataagaaaaataagaaatgaaaataaaattattgagaattcaaatttagaagaaattgaaaaagatgttgttgaatatttcaattcattatgtactgacttaaatattaaaatgtatttaaaacataatttatacgatatactcaactactatagtggtggtgctaatcaagttaaagcaatgttagcgaaaaggcttactatccttaattctatctactctcatgctgagttatctactcctccatttattattgactctccacgacagcaagatattgattctgataattatcataatatgcttaatattttaattagtaatacacctgacgatgtacagttaattattgcggcagtgcaaaataactttattgacagcattaaaggaaattttgaagaaattaacctcgaatcaacacttttaactgcagaagagtatgaacttgccaatttcttaatctcacatagttaa

SEQ ID NO: 93230 - DNA, 912 bp, Acinetobacter pittii
atgtttgaattcgccgatgatgtcgaatttgagttttatcaaatcaaaactactgaagctaattttacaatagataatctctgcaagtatgaagttggtggcaactctataattggaaaaatgattttaggcgttgaaaataaattatttaaaaaaaatgttaaaaaattatgtcttttaactattagtgatattaatttcaaaacgaaaattaaaattttaggggatcaatgccattttactaatttagaagaaaatgaaattaaagatattttagataggttaacaaatgaactaaagattgttgatcccatatatcaaaatattttatgctttcagaagtctgagttaccttttccttcgtcacaattaagtgctaaaggaaagattgctgaatttattcaatcgaagcatggcgatgttcgatcggatatatcgagtatttatcgagtactgtgggatgatttaaaaattaaatatgaatataaaatcccttttgaccaatggaatgaatgtgttcaaaaaagaggtttgaacagcgaagaagtaaaaaaaatactcgcgacacatatatcgcttgatctatctgaaaatttaaaaaaatttattgaaaattatataaataaactttcaggagatgatttacttacccctataagaattaatttaattaataattattatacatatctcttagtaaatagatcaccagaaattattaaatttttagaagaaatgagaagtaaaatttccattccttctaatattttagacttaaatgaaatacagcgcgaaatcactaaaatcgatttaataattaatgataatttgcaatttaaggaatttaatcggatgcaatctgtagctatttatgaggtcttaaataaagtatatgaacaattcacaaaatag

SEQ ID NO: 93231 - DNA, 843 bp, Acinetobacter pittii
atgaaaaataccagcaactcttttcaatttcagaaaataattattgtatctcgaacagaaaagtcaggtcgagttttaaagatatttccaaggacattgataacgacaaaaggtaatacaattggtaaatctacattattgaattgtttattctgggctctaggttgtgaagttcgtttcgaagaagattggcccgagcttgacacagttgttttaattgagttttcaattaataataaaatttataaagtcaaaagagattctcaagctattcatctacaggaagatgatgaacaatgggcaacctatgaaaaaataactggttcttatttagatagattaaattctattttaaatttcaatgttttattaaaaaattctaaagcaaaaaaactttctaaagtccctccagctttctattttgcatctacttatattgaacaaatgagtgggtggaatgaaatttggaattcatttaacaaccttggacaatttgataaaaataacaagtttgaactctccaaatatttatgtggagtattaaataaaaattactacgataacaaacttaatcaaaacttttatgaattaaaaaattttgatatctctaaagaaatcctaaaaaccaatgaagtatcagactactttagatctaaaagagctattagcccccaaatagatcttcaagataaaattaaaaactctgccagatcagtagtaatggctgaaagaaaaattttagaaaagaaaaacgagtatataaacatatcttccagaatggcagctatagataatgaattacaaattattcaagttgctattggagagattgagcaagactag

SEQ ID NO: 93232 - DNA, 1086 bp, Acinetobacter pittii; identical to SEQ ID NO: 92398

SEQ ID NO: 93233 - DNA, 699 bp, Acinetobacter pittii; identical to SEQ ID NO: 93229

SEQ ID NO: 93234 - DNA, 1044 bp, Brachyspira pilosicoli 95/1000
atgtgcatgcctaaaaaaatagataagaaatctggaagtatttcatacaataggtttgaatatcaaattactcaagcactaaatttagccataagtttatatgataaatataactatttaattatattagagcattatgatgatattacattatttgaaaataataataatattaaagatatacaccattatcaagtaaaaacaaaaaatgtacaatatactaaatttgaaaagatattaaaagaaggatttcttgataatttaattggtcatctgaatgataacaatataaatgatgtaaaagaaatatctttaataataaattgtagaataataatagataagaaaaaatatgaaatagatacaataataaaacctgatactacaaataatattttatctaaaataaaagatcattataaagataatgataatattgattttttagaaaaaactatgaatttaataataagtgatatatctttacaaaatcacatagaattaagaaaagctagaataagagaatttgtatctcataaataccaaaatgctggatatgatgcattaaattccgttgtattaagattagaaactttatttacaaaaatgcagagtgatgaatcattaactaatgattctaaatttgaagatgtaaaaaaaaagaaaggtttttcaaaagatgattttaatgatattataaaaaatgccattaaaattagtatacctgaatttcataagatagaagaatatgctaaatttgaagaaaaggaaatagatgactataaattatcatatatagatattcaatctggtatatctttgaaaaaagatatatataatttttcattacaattagtagaaaattatatacaaggaaatgagttaaatgatttagatgatataataaaatattcaaaacagtgtaaagagtgtatattaaataataatgataatttaattttaaaaagttatgataatacaaaatatatagaaatgttatgtataatattattatgtaataaatatacaaaggaacttcaatga

SEQ ID NO: 93235 - DNA, 1680 bp, Brachyspira pilosicoli 95/1000
atgaaaactgttatattaaataatatactaatagttgatacagatgaaaaaaaagcaaaatttcaaaaatttatagatggtataaacattattacaagtattgataattcatgcggtaaatcatgtctcataaaatctatatattattgttttggtgccaatactagttatgattctaaatggaatgaaaaaaataaattgattattattaatttccaatttaataatgataaatacaaaatatgtagatactatcataaatatctaatatttaaaaataatgatttgatagaatctactaaaaatacatcaatactttctaatagttttgaaaatatttttaatttttctatatatttaaaatcaaaaaaagataaaaatggaaactacaattatattatagcaccaccagcttttacattactaccattctatatagatcaagataaaagagatacagtattcgaaccttttgaacaattaacacaatttgataaaaatgaaagagataaagctctattctatcatttaggaatttatgataaaacatctatatctttagaagaaaataaaaataaaatagataaagatatttcaaagaataataatgaattagaaaaattgacatatactaaaaatatattggatgaagaatctaataatattatttatgatataaataatattacagatatagaaaataatttattatatgataaaaaagaattagagaatgttattaatttgttatctgaatcaagaaataaaattcaaaaattacaatctatgattataaaatacaataataaacttctatacttagaagaaaatagtaaaatatatagagatgtatgtgaagatattatagtatgttcaaattgtggacatataagcaatatagaatcgatattaaaaaaagaatacatattggcaaacaaaaatattataaaaaaacaaataaaaatatttatagttaacactaaattgcaattaaataaagaagaaaataattatttagaaataaataataaattaaaatctttagaaaatacaatatcaaataataataataattttgaaatttacacaaaaataaaaggtactgaaaaaataaaaaacaatattaatgacaatattaacaaattaaatatcacattagaaaacaatataaaagaaagtaaaaatataaagaaaaaattaaaagaaattgataataacaaaaaaaatgtagacaatctttttaaaaattattttaaaaaattatcaaatgaatctaatataagaccacttatagaatttaatgatatatcattactaagaaaaaaatcagatttatctggatttgctggggaggcttattctataataatgcatatatcttttattttaacaatgaaagaatcaaataacaattgtatcatattcccattactaattgattcaccaagatcaatggaagctagtaaaaataatagttttaacatattaaaattaataacagataaaatagagtttattccacaaataataatatccactgtggatgccaaaacaatttatactccaaataaaaatgataatttaatagaactaaaagataatttattattaaatgaaaatgactattctagtaatatagaaaatattaattacataaaggaattaatggatagaatataa

SEQ ID NO: 93236 - DNA, 693 bp, Brachyspira pilosicoli B2904
atgcctaaaaaaatagataagaaatctggaagtatttcatacaataggtttgaatatcaaattactcaagcactaaatttagctataagtttatatgataaatataactatttaattatattagagcattatgatgatattacattatttgaaaataataataatattaaagatatacaccattatcaagtaaaaacaaaaaatgtacaatatactaaatttgaaaagatattaaaagaaggatttcttgataatttaattggtcatctgaatgataacaatataaatgatgtaaaagaaatatctttaataataaattgtagaataataatagataagaaaaaatatgaaatagatacaataataaaacctgatactacaaataatattttatctaaaataaaagatcattataaagataatgataatattgattttttagaaaaaactatgaatttaataataagtgatatatctttacaaaatcacatagaattaagaaaagctagaataagagaatttgtatctcataaataccaaaatgctggatatgatgcattaaattccgttgtattaagattagaaactttatttacaaaaatgcagagtgatgaatcattaactaatgattctaaatttgaagatgtaaaaaaaagaaaggtttttcaaaagatgattttaatgatattataa

SEQ ID NO: 93237 - DNA, 1680 bp, Brachyspira pilosicoli B2904
atgaaaactgttatattaaataatatactaatagttgatacagatgaaaaaaaagcaaaatttcaaaaattcatagatggtataaacattattacaagtattgataattcatgcggtaaatcatgtctcataaaatctatatattattgttttggtgccaatactagttatgattctaaatggaatgaaaaaaataaattgattattattaatttccaatttaataatgataaatacaaaatatgtagatactatcataaatatctaatatttaaaaataatgatttgatagaatctactaaaaatacatcaatactttctaatagttttgaaaatatttttaatttttctatatatttaaaatcaaaaaaagataaaaatggaaactacaattatattatagcaccaccagcttttacattactaccattctatatagatcaagataaaagagatacagtattcgaaccttttgaacaattaacacaatttgataaaaatgaaagagataaagctctattctatcatttaggaatttatgataaaacatctatatctttagaagaaaataaaaataaaatagataaagatatttcaaagaataataatgaattagaaaaattgacatatactaaaaatatattggatgaagaatctaataatattatttatgatataaataatattacagatatagaaaataatttattatatgataaaaaagaattagagaatgttattaatttgttatctgaatcaagaaataaaattcaaaaattacaatctatgattataaaatacaataataaacttctatacttagaagaaaatagtaaaatatatagagatgtatgtgaagatattatagtatgttcaaattgtggacatataagcaatatagaatcgatattaaaaaaagaatacatattggcaaacaaaaatattataaaaaaacaaataaaaatatttatagttaacactaaattgcaattaaataaagaagaaaataattatttagaaataaataataaattaaaatctttagaaaatacaatatcaaataataataataattttgaaatttacacaaaaataaaaggtactgaaaaaataaaaaacaatattaatgacaatattaacaaattaaatatcacattagaaaacaatataaaagaaagtaaaaatataaagaaaaaattaaaagaaattgataataacaaaaaaaatgtagacaatctttttaaaaattattttaaaaaattatcaaatgaatctaatataagaccacttatagaatttaatgatatatcattactaagaaaaaaatcagatttatctggatttgctggggaggcttattctataataatgcatatatcttttattttaacaatgaaagaatcaaataacaattgtatcatattcccattactaattgattcaccaagatcaatggaagctagtaaaaataatagttttaacatattaaaattaataacagataaaatagagtttattccacaaataataatatccactgtggatgccaaaacaatttatactccaaatgaaaatgataatttaatagaactaaaagataatttattattaaatgaaaatgactattctagtaatatagaaaatattaattacataaaggaattaatggatagaatataa

SEQ ID NO: 93238 - DNA, 984 bp, Asanoa ferruginea
ctggctctgctcttccagcatcatggcacggccaccgactatgccatcgtctttgaatttcatgacgacgtggctctcttcgacgatcccgcacatccgaccaaggtgcgcttctatcaggtcaagaccaaaacgacggttggcggctggacgcttcaaaaactgaccaatcgggaaaaaaccatcaaaaagaaggtggcaaacattaagccgtcgatcatcgacaagatgtatgacagcgtcgccaaatttgatccgaatgtgttatccgtcgagtttgtctccaatcagccctgcagcttcaacgcaacgaaagccacctttagcttccaggcatgcggtacggctgatttccagaagatcgtcgcgagcatccaaagcgcgtatcccggcgccaccgaagcacaggttggtcttctcggatatcgtatgaccgatctgagcgttggcgatgctgggagccacatcaagggcaagctccatcagttcgtttgcgaccaactgggcgaagtcagcttcaatcttgagacgctttacagggccattatcgacgactgccgacgcaaagctgccttcactggcgtcaatgcgaatttcgcggaggtagtacgcaacaaggggattaccaaagacgacgtgcagacctggctcaacaccattcagcgtgagcatcgcgcccccgaatggagtgcgattatgcccttgatggctgggtattcttatctcgaaaatcttcggatcggacagcaatatgaaattgtccgatcggccgtgctcaatcctggcgatgcggcccttttccgcgtccgcaccgcagtccgcaaggcgatcgccgcgttcgatcctcatgcaccgcacacgctgtgccagctcatcgacgaggtcttcacctccagtcaggaggtggctcagaagtatctaaccccctattccccggaaagacttaaagcgattatcgcatatgagctccacacgaacgaatga

SEQ ID NO: 93239 - DNA, 864 bp, Asanoa ferruginea
atggaagatgtcgcggatcagaaaatcacgtgcccgacctgtcatgccatctacgacaacgatttcgcacatcgcttcggtctgattggtgacgccgatgcctgtcggggatttctcgccagcgctcgcgctgctctcgacgaagttgagcgcgacatcgatcgtcagaagacgttgtccgctgagttccagggccaggcaaaaaagatcgaggcgatccttgcggaaacgcggggcacggtcaaacttcaagacatgctcaaggacgagagccaacgtttgctggacaacacgatcgcggctgagcgcgacgcgatacaggaggggattgccggctggatcgggaaggagatcgaagcgacggaattaatgaacgactatagtagcccgaagcgaaaaaaggaaatactaaccttttaccgcgggaaactcacaagttttgcgcaggagctgggtgtcgaatttgttgatgcggtcggcaaggcagttgctcccaaaatcaacgagacgggcagctacggcacgcgcgcaatcatcgcctatcactatgccctccttcatacaattcaaaaattcagctcgtcttgtttggctccgatcatctttgatacgccgcttcaacaggatcaggacaaggaaaatgcgggcgccatcctgcggttcattcgggaccaccgtccgtccgatatgcagctaattctaggcactgtgtcgctgcatggtgtcgattatccaggcaggaagttcgagccggacgaggagttcaacctactgcggtccgatgagtacgaggcggtgtccacatatgttgcgccgctattcaaccggatgatgagagcagatgatggtcgaccgctgctatga

SEQ ID NO: 93240 - DNA, 1170 bp, Pseudomonas coronafaciens pv. zizaniae
atgcttgatacaaaaaaagccagggagcaaaacggtagagactcatttagtagatatcgtgcccaggtgcggtctgctgctgttgcttcactttcgatccttgaaggcggaactgtagatagggtttattgtgatctgcatgatgactttgttatcagaaaaaaagacggtgaaggatttacttatattttttatcaggtgaaaaccaagggaaaacaaaaccacaactggacaattaatgaagtctttggtctgaatactcaattgagagatcagtcaaagcaaaacgtagacgcgtttaaaggaagttttgtcggtaagcttctgcttcatactgttgtctttgatcagtattgtaactccgtaatatttcagacaaatgtgaataatagtgatgaggtcgaagatttgttatcggatatcgagtccggtatctttgctcataaattttcaaaggttatgttagatcgctttaatgaatgctttggtgagaatgtcaactcattcagccctgagcaagttaagtctatgttatctaaattgtcgtttgagtctgatgtatcttttttgaaagagggcgacaactactttgagttgatagtaaaggagaagatttatgaattcagtgagattgagcttgagcgcgctgagtttagagagattcttttgaggctactcgaactcgttgagaaaaaatcgagcggcgtcataaaaacgtgggacgccaactccatagagagctgcgcgggcatatcggtagatgatttgctctctatattaagcatttccaaggatgcatactacagtttgttgagtggtggggacggcaacgctataaaatctgcgtccattatacagcgcgctttgaagtctagtggtgctgatatctcaatgatcatgtactgttcaaagtgtaagacagattgggatgtttggtataggagcgctaggcatgtaatccaagagctagatcttttatcgatatcggagcgtgtctctgctatcttatacagcacgatgaatacgcagggggtgctaggtatgaacaatttgcgtataccgataaaaaatttgctagtcgaactggaaagcgaatccctaaagtttgatttgactaatgacctcatattgggcggtgttttctcagctttggttagaggtaaatcatga

SEQ ID NO: 93241 - DNA, 1770 bp, Pseudomonas coronafaciens pv. zizaniae
atgaaacttgtcagtttgaaaatatttcctaatggccaatcaggctggggttcagatcttctgatctttggtcgtgatattactcaactgtttggcccaaatggatgtgggaaaactccactggttcaatctattccgttttgtttaggttttccaagtgtctttaggaatgatatatatgataaatgcaagtacgccgagcttgtagtttcttctgctaagggagaattgcgacttcgtcgagtgtatggaagagatcttgacgtagaggtggttgagcctacaggaggggttcagaagttttttaatgaaagggattactctcaatacattttcgattggcttggtattgttactagtaatttggtaactacagggaatcagcttggtgcagcctatcttgcaacactgttgccaatatattacttagatcaagatgtcggatatagtgagatttactgtccgcctagtaagtttattaaagaccagttctcagaaatgatgaggatggtttttgatctgcctgtaaagaattcatttgatgtcaaaaaagatcgttttcgagctaaggagcgtttggagttcctggataaggatactcagacatttgccaggatggtagatctagctagaaagaatgtttcagaaatcactaagtcaaagtcggagatgctagccgaaatgtctcagctagaattcgagttggacagtcttcaagatgttggagctagccgggatgactctgttaatgctttagatcgtattatctatatccatagaaataatattagagagatatcggcagaaataaatcaattgcaaaggcgtaatttgggtattgggaagatcgttcacgagattaataccgaaatcgaaaccttaaatttgaatgaggaggcacgtagagttttcctatcattcaaggagatttgtggggctgacctgtgccagttgttctcgtcaagctctgagtcttatagtaaaaatctgctttatcttcgagatcaaatcaaggatttggagcggaacgctgaccttgatgaagttagaatcggagaactaaatcgtcaacgcgatgctcaagagcaagcgattcagtcgttagttgacgcgcgtaactcttctagcgccaaaagtgaaatatccgcgttggttgaggctattacgaggcttaaaacagaaatatttacgcttcaggggcagctaagcgaacttgagaaagtggcagctctagaggggaagcattttaaagctattgtggagcgagataaagcattgacgttgtatgagtctttttcagtagatagaacgtattcgccagatttgattaaagttagagcggatattcgccgtaacttcatagagtggcttgatgttctgcatacaaataatgttagcagggatataacctttaaagatgatttttcgcctctgctcggtgtggaaacgatatctcaactcaaaggtagcacgaaaattcgtgctgttttggcgtatcacgcggcggtatttcaagctttcgcagagagcggggtgttagggtttaagtttatgattctggatacacctaagcagcatgagattcataatgatgatttgggtcgttatttaatgggtttgaaaaaactatgtagcgatcgtggcgcccagatagttttttcaacgactgaataccactatgatggggatgacaatgatgcggagtggctgcctacttatgatggagaggaacagaagatgtttttgaaagtgggtggtgttatagcgtag

SEQ ID NO: 93242 - DNA, 1539 bp, Janthinobacterium agaricidamnosum NBRC 102515 = DSM 9628
ttgtggttttgcaggcctaatataagcggatcatttcttgatttgacatcggatttagccaccaaatgtgacaattggcgtatttccaaacagcaaccatccagtaaaataatagtcctaagggaaatagtacctaggagccacaaagaggcttcttatttggaggtagcatttaaggcgccatgcgctgcacatcaaaatactgtacatttatacagtattaatgccgattcctctatttcctctaagcacaccggcagtcaacggtggagagagaattttctattttcccgtcgctatcagcacggattagactatgttgcgcccgcatttcacctaacgcgaattgcaaccagggagataaaagaacaatccatgggcaccctccatgacaaagcgccacgtgaaactgtcggccgagaaaccagcaaccgcttccgaatgcaatttcaagctgcggcttttgccgctctggagattttaagtggcaaggatgttgaccgagtgtattgcgactatcatgatgatttcgtcgtgcggcgtaatgtcgacggctcagtccaatatcattttttccaggtcaagaccaagggaagagcaaatcaacaatggaaggtcgatgaggtcttttcactgaagaagacgggaaaactcgacacggaagagaagctcgtagccattcgagatagcattgccggcaaattgttcgtccatacaattgagtttggtgaagaatgccgagaagttacggttctcagcaatgttcattttcaagaggacgtattcaaggtccaggagcacctcaaggcaggagcgtctgatcgttcttacattacccagttcatcgagaagtttggcgaaatcttctcacctgaaataccgctttctgatgaccagatcaaagcggctagagcgaagctaactcttgtgcaagtttcctatatgggggaaaccctcgagcagttcgctgacgccgcgcggaacgctatctggaagcatagtgaaatagatctccacaagcatgaggtcgacgagattgcaaacagtctcgtggcattagtagaagcgaagtcttgcgagccaatcaatggagtaaccaaagacaagatagacgtcgtcgcgggtgtcggaatcgatgacctgttgaaggtgctaagcatctccactacggtgtacaggaatctacttagtggggacgaccctgctgctatcaagacggcttccatacttcagcgcgagctaaaatctgccggcgctccggaaagcatgatcgaagctgcatctcgtgcaaaggtttcatgggacgtttggcttcgcacagcgcgtcacacctatcccgagttcgatctcgaactgctcctcaatgagatcgatgccaagtgtcgcgtttggattgttagcagtggcgcgcttggtcaattaagagagaagatcgatgagatagtcggttcggcgttaggtaagaaatttcctcgcttggacgtcgacctgttactcggtgcattttgcgcatcaattgtacggagagcttcgcgatga

SEQ ID NO: 93243 - DNA, 1779 bp, Janthinobacterium agaricidamnosum NBRC 102515 = DSM 9628
gtgaggttgaagtctctaaaaattgaaccgcttggtcagaatggttgggaaagcccgctactcgaatttggctggcgaaccacgctcatcttcgccaagaatggtagtggtaagactccgattatccagtcattggcagctagtcttggattcccgccgaagttccgggacgagattttcagcaaatgctctacggtgacattggaggccgagaacgacggtgagccactaatcatccgccgaattctaggagcgaacaaccgcgacttccacgcgatcatgacctatcggggtcaagagtctgagcattacaatgaaggagccttttctgcggctcttttcgaggcgcttggtctagagcctccccgcctcgtaacgaccggcgggcaggtagcacaaccttacgtgtctaccgtcctgccagttttttacctgaaccaaggcgatggctacacggcggtctataagtcgaatagtgcgttcatcgctgaccagttcgtggagatggtccgcttcgtgtttggcttaaatcccaagcactcgttcgatgtaaagaaggacctaattggtgagaaggcagcgcttgaagcgcagacacggaagatcgtggcagcgcaacgaattttcgagtaccaatcacgaggcgttgactatgcccctgccaaccaagatgtacttcaacgccgggtagctgatatcacaggccaaattaacacgctgcgagattcagtcgacgcgaaaggtactgctagttcagcagtcaccgaactgcttcgtcaaaaagaccaacagatacgatcaaagcaaattgaactctccgaactgcagaatcgcgtttctgggattgactccattcgaacggaaatcgaaggtgaagtaaagacacttggtctcaatgaacaggctcgccgagtgttctcttctttcggcgaaatttgtggtgcaactaattgcggcttgttcatgggcagcactgagtcgtatggcaagaatctcttatatctccgtgaccaaatcaaggacctcgaccgcaatgcgttacgcgccgagattcgtattgagcagatcatagaagtcttgatgaatctgcaagtagagcgccaagtcctggtgactcaactgaactcaccagcagcggccggtatcgatcaactcgtgaccgctgttcagggactgaccaaacagctggtagaagcccaaggcgaactcgggagaatggtcgcgcttcaaggggagcgatttaagatcgtaaagctagaagaagagcggctgcgaattcaggagcgtattgatagcttatccaatagtggccgaaccgatttcgatttcaataaacttcgctaccaattgcgtgaactggcggtgaagtggatggacattctggatacccataacgtatcgaggaacgtcgacatcgatttagaccttaggttcaagttcgacggtgagtccttagatctcttctccggaagcacaaaaatccgtttggtattggcaatccatgccgcgctattcgaagcctacatatcagagccatcgcgaccattcaggctgattattctggatacaccgaaacagcaggagcttcataccgaggacctcgcgaaatacctccgtgagttggaaaatctttgtgcagcaaagaatgctcagctaattctttcgtcaacagagtacgaccatccgactggaccgcaggacaagcgatggctgccgaaatataagggagctgaccatccgatgtacttaggcaccgccggcgatttcattggcgattga

SEQ ID NO: 93244 - DNA, 1014 bp, Dehalobacter restrictus DSM 9455
ataccccatgacctgtcaggctcgatgagcaagaatcgctttcgtcaagagttattctggggaataagcaaaatgtttgacctcctcgatagggagaatttttgtattgtttttgactacaagtgtgatatcgaaatacatcttagcaattccattgaattctaccagattaaaacgcataaggtgcagtcgccctataaattcactgcattaaaaaagattgatgggaagcagagcatcatagcaaagctttatcttcttaaagacgcttcatcgccagatgtaccaatcaagtgtgcgttggtatccaatgctttctttcagatcggtaaaaccccgaaagccgacgttgagactttctgttttactgatttggatgacacaagccagaaaacgataatgaaagcactacagaatgagctaaaacgcagcaatgtcgatttaaataatcttcactacatatatacatctatgaatttactttatccgcaaaatgaccttaaaggtaaaataataggcagttttgagaaaatcaaaggttgtgaaccaattaaaccaaatgctttatatcgattaattgttgatactgtggaggaaagagcatgttatgaattgtcagcctttaattacgatgagttggtgaagcgaaaaggtattacaaaatcagagctcgataacatgcttgaccgacatatggaaaaagctgatgactctgttgagcaggtccgtgtgctcattgatcaacggcaattgacaattagagaaaaaggaaagctcaaagcagctttggcgaaaattgttgagctcgaatactccgcaaaggaactccaacaaagcgaaaaaaagatatctggatatattaaagaaatagcaactgacgtcacaatagagcaaatggcggatatacttctgcagcaatttggctcgagattctcaatcgaatacagccaagaggaaaagtacgtttttttgcttttgatcatcaagcgttgggagggcggaaaatatgcgtaa

SEQ ID NO: 93245 - DNA, 1698 bp, Dehalobacter restrictus DSM 9455
atgcgtaagcttgtttttaaggaactgtttcttttttcgagtattgaaaagaaagcaagaaaaattgagttttcacttggcaagacgatgatcacttccagttcgacagatggtacggacagaggaaaatctgttatcatgaaatcactgtatcatgccatgggcgcagactgcttttttgaggataaatgggacgatgcaagcaagacgtacatactctcatttgcgatcggtgatgacggatattatatatttaggcataataagctttttaaagttttcgacgccaataaagacttgatgtttacgtctgtctctcgtcatgaactggcagagcgattatatgagttattccactttgcagtgaaactccccaagagaaataataatgaggatgacgaaccgatcgaaaggttggaagttactcctcccgcctacaattacctcttaaactttgttgatcaggataaacaaaacggatcgcaattcgcttcttttcagaggcttagtgaatatcctgactttaaggaaaacgttctttattaccatttcggagcattcgacgataattattacagcttgatccagcagcaagaaaaaatagagaccgaaggcaaaagactatcaaaagaacaagacatgatgcttatgatgcttgacagagtttacgcaagcattaacgatgtttcatattcgatggatattgaacatcttcgcgccgacgtaagccgaacgaaagataaatacaacacgattgcccacacgcttaatgatcttcgtcaaaagttagttaactttcgcaatgatagggctgatctggaatatcatctacgtgcattgagtcttcttgataaggaaaacgaaaagcagattgctgctctaaaagagcatatttgccctctttgtaaatccaatcttgatgacactatggatattcgtataaaacgctataatacaggcgacgacatcattttgctcagtagtgacattcagtacagcattggagaaatcgatcgaaaaattacggttgttgaagcggaatactcaaactggctaataaaactggaagaatacgaagcttcaataagcatcaaatccaccgaaattaatgatgttatgcgtcacaaaggatatattgacatcaaagaaaaaatctcagacgatcttcacgccgtgcaaggatcaattgccacgaatgaagctgacgcaaaggtagttaaaaagaaactacgtaaatacagcgatgcaaagaaaaagataaatgaaagatattacacacttatgctcagcgacaaaaattggttcgggcttgaaggtattgattcaaaaagctttgaaaatatcaagcggacattttcggctggaggtagcaacaaccctatctccacaattatttggtatgtaaatttgatccagttaaagcacgagttcaatcccgatgctattaattttcctgtcgtatttgacagtcctaataatgctgagaccgacgatgaaaaaaggaaccagatttacaagtatatttgcgaacgcatttcctcaaaccaacttattgtctctggaattggatttactgaagaagctagtaatgtccattttgacaaagtgattacgctcgcaaatgaaaaatatgaattactctgcgaagaggattatatagagaatgttgatctgcttcgcgaacttaataataggtaa

SEQ ID NO: 93246 - DNA, 1113 bp, Xanthomonas arboricola pv. celebensis
ttggatacaacaggtggatcttcagatagcaaccctcttgcagccgcacagcgcgaaagggctggcgctcaaacatttgagaaatacgaatatcagtatcactgggctctctgccgaattcttggtgctcacgaagaatcagatgattacgttgtctttatcgagctccacgaggacgtggtattggcgacttcgaccgatgaatcggtagcaagatttgagtttaatcaggtaaaaaacgtcggcactggaccttggaatcagaataaattgacctcaattccaaaggggtcttcaaagaaaagtaatagctcgatccttggaaaaatgcttcaaggagttcgtcaaaagcctttcgccgataaattaaaatcactcgatttggttgcgacctgcggctttaagcttcctcctaagacaggcggcctaaaactttcagttatttcgatcggtaatcttcatgaagattgcctgaaagacattcaggctgcaatcgatgaagaactcggcgtttaccctattccaaaaactttgaggttcatcacgcccgatctggctacttctggatttcaggatgtaactatcggacgaatttccaagcttgttgacgtcaaagctcccggaacgatgtgtaacgcatcaacgatctatcgagtattgatcgatgacttgcatcgcaagggaatggttgcttttgactttactgagtggagcgctcttataaagaacaaggggaccacgcacggcgatgttgagcgggttatatcttcttacaccgagaagaagggattcaaaattttcgagaaagatttagaagacatcctcaatgatctcgaactgaaattgaacaagaaaattcagatgcgcagggcgtttgagcgttatcacaacgcgattcgcttcgagcgctcgctggttgttatcgacaatcaaaaaaatatcagggcggcggtcgagagtaacttcgaagaattcgagggacaaggtgtgaagaaatttcttgaattggcgcttggcgctctgcccgaacagccaaaaactgacatcgcggattttgagtcaattcaggcggcgatcatctacgagctgttgagtaaaatccatgaaaaatga

SEQ ID NO: 93247 - DNA, 1752 bp, Xanthomonas arboricola pv. celebensis
atgaaaaaattagcattcaaacgactggtagtggcgtcagattccctaaggtccggaaatcagttcgaattcaagcctcgcttcaacttaataacggcaaacgacaatagctttgggaaatcgaccttagcgaagttgctattttggactttgggcggggaccctgctttcgatgcgacatggacgggatttgatgttcgctgcctggttgatttcaccgtcggtgatgagatttatcaggctgggcgatacgggggcatcatgttccttcgacgtcccaatggagaatgggagaagtaccacaagattacaggcgcatattctgaggcctttgctgagatcgtaggcttcgaggccctgctacctaccaggagcgattcaaccaagctggaaactccacctcctgcgttctattttttgccgttctacgtagatcagcagcggagctggtcccaggcatggaatggcttcactaatcttgagcaatacgcaaagtggcagaagaccatcattgaataccatacgggctatttgcttcctgagttcttcgcctttgaagagcagatcgcagctaagaacctcgaaaaaaagctcgcagagggcgaagtaagaaggattgagaccgctattgaggtggttaacacttacgttccccaatccagtaaaacggtcgcgctatcaagagctgagtttgatgtccttgcttctgaggtttctgacgatgtcgccgagctgcaggccaagcaagaagacttgcttggaacgatttctgaaattcagacagaacgcatctatctgcaaggtcagcttgatctggcaaagcttgcatctgctgagctcgataaggattacgctttttctgtcgagtgcgttcagggtgaatctcttctttgccctctttgcggaactatgcatgacaactcgtcgccgaatcgggcctccattctcgctgacaaagatgaggctgacagtcaagttgtgcagctcgatggaaggctgaaacgcctgaataaaaaattgtccgattcgcgggaaaagctggagggcacgcgcttcgaaattgagaaaataaacaataaatacaaatcgcttgaacccgctaatgcagctgatggacagatagggcctgtagaagcatcatttctagacagcatcgcatcgcgtgctgtccaaaaacatgtacaacggacgatggagggcaaatcggctttgatacgtaccatcaagtcggcaaatagagccttgagggcagaacaaaaaacgctcctcaccaaagaagagcgggaggatttgaatgccgcgtttaagagctccttggcggcccatgttcaagagttgaatgcgcaaggcgtcaatctggcgccaatcgaatcacctgtcgattacaagaaactctacggaagtggaggggcggcggaaagcacccgtggcatccttgcctactacatgtccgttatacggcaggcacacgaggcggaaaatgaagtgtttcccgccgttgtaattgacacgcctaatcagcaagaacaggcggatttcaattatgaaaatattctgaagttcttgatggaacaagtgccttcgaattcgcagctaattttatgcgcaatgaatcgagatgaaatccatggctataagagcgtggctcatgtgatcgaactggatgaaaaaaagatactaaaagacacgaattatgcagagtgccgagctctgcttcactttgatgaaacaatcgcgaaagctcaactgtag

SEQ ID NO: 93248 - DNA, 1113 bp, Xanthomonas vesicatoria
atgagttctaacgtcatcgctgacttcatgtcagctgcgcctctggcggaagagggcggctcaatctccgcagatcgctttgattatcaaaaaaactgggccttggctcgattgcttaccttgcaccagggctccggtaactacgtgctcctttgcgagttgcacgagggcatcgctgttcttgattgtccggaccagccatcacgcgcctctttttatcaaataaagaccagcgaaaagaatgcgtggacgctgaagaaactgacgaatcgaaagaagggcagtagtggcaatgtcctgccatccatccttggacgactgtgcgcgaaggctgcgcagcttaaagagcagcaagtcacattccaattcgtcaccaacgtgggcagcggctatagctttcccgtgacggccaaggcctctgaatcctctggtgagcgcttgtttgaagtgctgaagcctgcagactgggaggcgatgaggaagagcctggcagacgaactaggggaggacttggacaagtcgctccaggaccagttaacgatctcgatcgcccagattcacctggatacgcataacgaaaccgccgtggggttggtgaccaacttcctggatcagcatgtcaacggcgctcacattcgccctgccgctttctatcgaaccctgttcgacgagctgcggagaaggaccgtggccagaaggccttccggcaccatgtcggacgtgtgcaaggcaaaaggcattgacaggtctgccttcgacgcgatgctgaacagcgcacaatcggtagcaccagctgcaggagcgtgggcccatgttctggcggagctacacagagataacgtctctttttctgtccgcagccaacttaaagatgcttatccggactacttctccagaatgcagagccccctagatgctgctttccgaaaggaccggcagattttggtcgcagctagtgagagcgcgatgaccaatagttcgaccctccttgagatggcgagcgcggccgcggtgcttgctcggactgaggctggctatggcgctgctgggctttccccggagcaggaactcattgttgtaatgatggccttctatgaaacccacccccaataa

SEQ ID NO: 93249 - DNA, 1698 bp, Xanthomonas vesicatoria
atgaaaaacttagtctttcaaaagcttcatctcgtatcccatcgggaacgaaaagcaaggtcagtcgagttccatcccgacgtgacggtgatcaagggcctaaatgacgtaggcaagtcgtcgctggccaagtccatctatggaaccttgggtgctgaagctgcggaggtccatccggattggaagggcgcgagcgtcatttcggcactcgagttcactgttgatgactgcgcctatgtcatgctcaaggaaggcaaaaccttcaccttgatcaaatcggaccaggtcctgggctgctataccagtgttaccgaaggcttgtcaccggttctttatgaactgctgggagccaagctgcgcttgaagaaccgcgctgaaaaagtagttgttccaccgccggcctacttgttcatccccttctatgtagaccaggacgctggttggggtcatccgtggacgtcatttgctcgcttggaacagtttgctcgctggcgggaggatgtcgtgaacttccatgtgggggtcacgggcgctgaatattttgaagccctcgaagtccaagcggccgcgacagcagcaagggttgagccagccaagcaattggacggcttacggtcgcttcaaaagcgagcaaacgacgccgtggttgaagacatcgacatggagatcgatccagatgtcttctccgaggaaatcgagcgggtggtgggtttgctccagcagttagtagaagttcgagaagaggagagaacaaaactctctgggttgacccagcgtcgtctgcaactgcaagcccaaaaagacattctggatcgtgttcgcagagagctgcatgcggactacatgttcgccgtgaagcatgaaggtgacgacttggagtgcccgacctgcgggcagcttcacgaaaactcgtttggtcagcgcttcgccttagcccaggacgaggcacggacagatgatgttttggttgaagtcatggatagtctagcgctcgtctctggccagattgctatcagtcgtcagcgtttgaaggatgcgacagaggacgagcagcgattcaatgagctactcacgcgtcgtaggggccaagtcactttcgctcggcttctggagcgggcaggccagaaaaggttctcatcacaactggacgaccaagccgctgattttgtccaagagattgccaatctggactatcggatcaagcaggctgtcgagcgactgagaagtgcgcgctccacagagcgaaagaaggagattctagaaagctatgcaggtcttttgactggctttgccaagaaactcagcgtcacgttccaagacgaattccttcagtccctgatgctgaagatccatgagaccgggagcgaccgaccgcgtgccatccttgcctacgtctacgcaatccttcatctcatttgggatgcggaagacgcggtgaggtgtccaattgttctggactcacccaagcagcaagaccaagacgatatcaatcacctcaacttgctccacttcattcgagacgatagaccgtccggatcacagctcatcttgctgcttgtcgacgatgcagaagttgactttggctgcgctccgctggttttggatgccaagtattcgctgctgtcttcggaggaatacgagcagacatctgaggtgattcgtggatttcaagccatgcgggagatgtcggcccgttga

SEQ ID NO: 93250 - DNA, 1113 bp, Xanthomonas vesicatoria
atgagttctaacgtcatcgctgacttcatgtcagctgcgcctctggcggaagagggcggctcaatctccgcagatcgctttgattatcaaaaaaactgggccttggctcgattgcttaccttgcaccagggctccggtaactacgtgctcctttgcgagttgcacgaggacatcgctgttcttgattgtccggaccagccatcacgcgcctctttttatcaaataaagaccagcgaaaagaatgcgtggacgctgaagaaactgacgaatcgaaagaagggcagtagtggcaatgtcctgccatccatccttggacgactgtgcgcgaaggctgcgcagcttaaagagcagcaagtcacattccaattcgtcaccaacgtgggcagcggctatagctttcccgtgacggccaaggcctctgaatcctctggtgagcgcttgtttgaagtgctgaagcctgcagactgggaggcgatgaggaagagcctggcagacgaactaggggaggacttggacaagtcgctccaggaccagttaacgatctcgatcgcccagattcacctggatacgcataacgaaaccgccgtggggttggtgaccaacttcctggatcagcatgtcaacggcgctcacattcgccctgccgctttctatcgaaccctgttcgacgagctgcggagaaggaccgtggccagaaggccttccggcaccatgtcggacgtgtgcaaggcaaaaggcattgacaggtctgccttcgacgcgatgctgaacagcgcacaatcggtagcaccagctgcaggagcgtgggcccatgttctggcggagctacacagagataacgtctctttttctgtccgcagccaacttaaagatgcttatccggactacttctccagaatgcagagccccctagatgctgctttccgaaaggaccggcagattttggtcgcagctagtgagagcgcgatgaccaatagttcgaccctccttgagatggcgagcgcggccgcggtgcttgctcggactgaggctggctatggcgctgctgggctttccccggagcaggaactcattgttgtaatgatggccttctatgaaacccacccccaataa

SEQ ID NO: 93251 - DNA, 1698 bp, Xanthomonas vesicatoria; identical to SEQ ID NO: 93249

SEQ ID NO: 93252 - DNA, 1167 bp, Burkholderia thailandensis
atggacgtcatccatgacataaaaccgcgtgagacagttggtcgcaacaccgttgcaaggttccgtatgcagttccaagcagctgcctatgcggcgcttgagatcctgagcggcaaggagatcgaccgagtctactgcgattatcacgacgactttgttgtgcgcagaaccgtagccggcgtggtcgactaccatttcttccaggtgaaaaccaagggtaaggcaaaccagcaatgggatgtcgcggaggtgttctctctcaagaagaccggggcgctggatacagaagagaagttggaggcgatccgcaatagcatcgcgggcaagctgttcgtgcacactgtcgaatttggcgaccagtgtcgtgaaatcacggttctcagcaacgttcacttcaacgacgatgttcacgatgtcgtcacggacctctccgctggtacgtcgagcaagaagtacatccgtcagctcatcgaaaaatttgctgaaattgtttcgcctgagaccccgctgtcatccgagcaaattgatgcggctcgtaagaagctctccttgctgccgaacgttcagtacatcggcgacacgctcgaagcgttcagtattgccgcgcacaacgctatctggaggcacagcgagattgagctgcatcaacacgaggttgagcgcctcgcaagaagcttggtgacacttgtcgaggaaaagtcctgctctcccatcagcgggctatccaaggctgacatcgatctagcaactggcgtcggcctagaagacctacttgatgtcttgagcatttccacccaggtgtaccagactctgcagcaaggcggcgaccccgctgccatcaaagtggcgtctattcttcagcggaagctgaaggaggcgggtgccactgaatccatgatagaggcggcgtcgcgcgcgaaggttgcctgggacgtctgggtgagaactgcgcggcatacattcccggatttaacgttcaacgtcttgctcgatgaagtcgacaagaagtgcaaggcatggctgcttggaggaggcgtcttgggagaccttgagaacttcgttcaagcaacgctggactccccgatcgcgaagaacttcgcggcactagatacggacctggtgttcggagccttctgtgcggccgtcgttaggagagctactcgatga

SEQ ID NO: 93253 - DNA, 1764 bp, Burkholderia thailandensis
gtgggttggcaaagcccgctcctggagtttggctacaggaccacgatgctgttcgcgcgcaacggcagcgggaagacccctgtcgtccgtgcgcttgcgtccgcgctggggttccccaacaactttcgaacagacatcctcgagaaatgtaacgcggttgtcttgcgcgccgagtcggaagggaaaccgctcacgatccgccgcaccatcgacgcgacgaacgaggggttttacgccacgattgatttcgatggcgagcaaaccgaacactattcacagggttccttctccctcgcgctatttcggcttcttgggctgaagccgccacggctggtgtcgacaaagggcgaggaggcacagccctacatcgcaaccctgttgcccctgttctacctcatacaaggctacggatattcagctgcttaccgtgccccaagcacgttcatcgcagaccaatttgcggagatggtgcggttcgccttcgggctgaacccaaagcattcctatgaggtcaagaagacccttatcgaagagaggagtgcgctcgaggcacagacacgtaagatcgttgccgcacagcgtgtgcttgagtaccagagccgtggcgtggacgatagcgatgcaaaccaagctgtactgcagcggacggctgaaaacctgacgcagcagatcgacggacttcgtgcgtctgtggacgcgaggggaaccgcgaactcgacgctcactgaactactgcgtcagaaggacatccaaatccgagctcggcaattggagctcttcgaactgcaaaatcgtgtcgctggcatcgagactattcgtgcggaaattgatggcgaggtcaagaccctcgggctgaacgaagaggcccggcgtgtcttcacgtcgtttcaggaaatctgccgcacgccgaactgcgggttgtttctaggtagcactgaatcgtacgggaagaacctcctgtatctcaaggaccaaattaaggacctggagcggaacagccagcgtgccgagattcgggttgagcaattggaggagcgacttaaggagctaggcgcggagcgccagacgctcgttgacaacctcgaggcgcccaatacctcggacgtcgaccagttggtgacagcggtgcaggccttgaccaagcaacttgttggcgtgcagggcgaattgggccgaatctctgggttgaaggaagagcgctcaaagttattcaagctggagcgagaacgcgatcgtatccaggatcgcattgacgggttgtccaacaccggtagagcagacaatgagttcaacaagcttcgattgaccctccgcgaactcaccgtgaagtggatgcagacgcttgacacgcaaaacgtgtcgacgaacgtcgacattgatttgaatcttcgctttacgttcggaggcgaaacgcttgatgtcatcggcagcggcggtagcagtagcacgacgatcagactagtcctcgccatacacgcggccctgctggaggcgtatctgtctgataagactcgtccattccgcttcattatcctcgacactccgaagcaggaagaactccatactgccgacctggcccgatatctcacggagctggagaagatgtgcgaggcaaacgatgcgcagcttatcttttcgtccactgagtacgaacatccaaccggcccgaaggacaagcgttggttgccgagttaccgcggacccgacaagccgatgtacctcggcaagccaagcgaacggctagcagacgatgagcttgcgtga

SEQ ID NO: 93254 - DNA, 1131 bp, Burkholderia vietnamiensis
atggcgtcatccgcaacaatcgtggagctctgtcaggttgagaacgatgatgatctgcacgaattcgggggtgggcacggaaacaagggcaacgacttcgcccgattctggctcataagcgagttgatagcgctgaccgaagtcggcacaaatgactacctctttattctagagtacgttcaagacgtcgctcgcatagacgacccggcggcacctgcggcgatcacactatatcaactcaagaagaaggaaggcagcgtttgggacctcaactcgttagctggtctcactgaaaagggaaagcaggtcaaacccgcgtcgccactcgcgaagattgtgaaatccgtactcggctttaagatgctgtcggcaagcgccgagttcatctccaacgcacgatttaacgtcaaacttgctgcgggcgggactgctcttcagatggactatctttccttggcagacctgcaggttgaaaggcagtccaattttcgtgacagtgcagcagcggcccactcggtaccagcagcgaccattcctcttcagaaaattggccttcggtatgcacctatcgaagtcaacgacatgcgagtacatgtcatcggggttgctcacggattcctcaagaagctcagtatcgcacatgcggcacaggctgactcgttcgtggacgccttattcgcaaagctagcgaccgcctcacgcaacacgtccaaatgccagacgtgggaagaactggtcagtaagcgcggttacagcaagaagcagttcaacgacgcactcgccgcgctacaactgctgcctgatcagcaaggtcgacgtgaaactctgctcaaggagctcgcatcagcgctcgagtggcacacacgtgatcagatgaggatagaagtcgccctcaccgaactagctcggttgaaagtcaccggtggcgaactatctatcgcgaacgtcgattgggctgcactgcgcgccgtgagcgcaacagcagaagccgaatcctggtcaaccgcaaaggagttcgaggccgtcgagagctgcctcaagggatttcttccagacgaatccgtcgcgcgaatacgcgcactagccatttacgggatggtccaagcatggacaagccaaacgttcgcctaa

SEQ ID NO: 93255 - DNA, 654 bp, Burkholderia vietnamiensis
gtgtcgaatatcttggcggtcaaacgtggtcgccgaactttcgaggacgtggtgaagagccatggggctgaggcggcagaggcggcactcgacgcggagatagcgagcattcagaaagccgcgaccgctaccgcagagactatccgagggctcaagattgaacttgatcaccttatgaagaatcatgatgccggtgaaccgctcagaatcttcagagaaacattcaaagaacttctcgtagtcgccgacgtacccgaatttagcaacttaggcacttggaaactcaacaaacgaccaaccgactcaggtagccctggccctcggtcggtggtagcgtattacggtgcactttggaccgtgatgaagagtacggagtcgttcttgcctagcccaattgtcatcgactcgccgaaccaaaatgcccaggaccggaagcaccttgagcgagtgatggggctgttggcgagcaaaacgccagcaaacgcacaagtcatcctatgcgcagaagaccccagcgactcgttcaatcctgacaaggtgatccaactcgaacgagagcgtgcgttgctcgagtcagatcagatggacgaggtctctgcccgcgttctgcctttaatcgagcgcgccatcacagaacttagtcgagcaggttag

SEQ ID NO: 93256 - DNA, 1110 bp, Pluralibacter gergoviae
gtggctaaaaataaagcggcaaacgccggggttgatgcgttaacaggttttgagtttcaaagaaactgtgcattgtatcttttgttagataatttcaattcttttatcaataaagagttctttatttgtatcgaacatcacgatgattttctattttgttataaaactgattgcttaagttatataaacgagatacatgcctatcaagcaaagaaacttagcgggaaaatatggactatcgattctaggttttctgagatggtatctaaaatactattggtgggcgaaaacttaagaaatgatgcttttgaaaaaagtgaagattataaacaccagctaacatttatatcaaatacagaaatagaattaaaatactcaccgtcaaaggcgttaaaaaaagaaggtattactgaacagatattaaggattaatgagcaaaactctatctgtgcttatgatgaattgcataaaaatattcagaataaaattgaagagaaagttacagatatttgtaatgaagaatcttctgttttccatcgtaaagaactaagtaacctaaaaattcagtgggtagattttccaagaacagctgcaaaacaaaaagaatcgcttattggacttatgtcaagaaagttttctcatatagctgactcgaaagcagccatcgaggtaatacttgctctatttagaaatgtggaaactgtatataatcaaggacaggaaatatgtctactcgatccaacaaaaagggttgaaggcgaagaagttaagaaagttatgaatataattgattcacagcaaaaggcattcgactattggcgtgacgaagcacagcaattctcaatgaaattcagaataccacttagcatacagaaaaatcatgaaaactatatactaaactcttttgaactactcaaggatatgagtaattacgattatcaaatcattaaagactttgttagaaataatgattacacaactcaatatttttctcttcaagacgcattaactgcatatgttgataatgttagaaaatctcattctataaacctagataatattgatacattttttgcagttctgtgttcatacgttgagtgctacgattaa

SEQ ID NO: 93257 - DNA, 1764 bp, Pluralibacter gergoviae
atgaagacaattataaagtttgatagattgtttgttgtctctgaaagtcataatttatatttcgaccaaaagttttcaaataaaataaacataataagtgggtgtaatacctcaggtaaaagtactttaatacagagtattttatttacctttggaattaacgatgttaaagatggcttgagcgaaattattcgatacaaccctacgttcagattggatttcagcatcactaaaggaggcgtagataaaaaatatataatagtaagagagcttggtagcatatatttaaaagaggatgggggaaatgtttttagttttcatggaattgactctgatggtcgagttgaacatgtgaaacttaaggagatgttatctcaattatttgattttaacatgcttttagaacagaagggtgagctaaaaaaagcatcgatagaatgcatgttcctgccttattatatttctcaatctgtagggtgggtttatttaagagagtcattctctaatcttggtttttataaagactttaaagatacgtatcttgattattatcttggcatagaaaattcttttgataaagaatatttttataaattaacaaaagagcgggcacaacttcagtcgaagatctcctcattgaataaatatagcgccgagcctcactttgttgtttctaaattactggatgaagagtttggtgatgaggctcagaagtatatagatggttatataaaattagtagcatcattagacgaagaacgtgatgtatatactggtttgtgtaataagttatccttaactaaaaatcatgtcaagatactaagaagaactaaaagaaatattaaaaaccaaaactataacaatattgatcgttgtcctgcatgtacgcaaatacttccttattccttagaagggttatatggttattatcaaaacatcaatgatactgataaactatcggagcaaataaataataaaatacaaaaaatacagtctgacattaatagttcacttgcgaagattaaaaagttagaaattgatatatcttcaaagtattcatattttattgagaaaaaatcacaaaatttatctgttaacacatggatcgataataaagcaaacatacgtctgttaggcaatattcatgaagagatagaagaatatacaaaaaggtctgatgaaattaaaggattaattgatgggatgggagaggagcagtctctttttgtcgagcggtttaacaaagaaaaagatttcaaggaaatatttaaaaaatatcttaatgatatgcagttgttcaatgtaacagaacctagatatacagatctttataaaataaattcatttccttttcaaggggttgaacttcataaaactgtaatgtcatatcattttgcattaaattctttaataagaaaaacagacaatatacatcgacttccatttatgcttgacgcaattcttaaggaagatatcgatgacagaaattttgatctcatactgtcgtttgtgggaaaaaatcttccgactgatactcaatcatttatatcaatgtctgagtatgctgaagataacctcttgaaagatggtaaagagataagtgcattccgaagagccaaggttaaagatattaaaaatcgatacttccctgatggtacgaatttattctttattggtgatgggaagcatgagagaacatttttatcaaaacctttggatttaaacctcgatatttttgtcgatacttgtcggcttactgaatga

SEQ ID NO: 93258 - DNA, 1020 bp, Mesorhizobium plurifarium
atggccttcgactatcaggtgaacgtctcaatggcgctggttctcgacctcttcagacagggcaaggaattcgtcgccctgttcgatcatcacgacgacctcgtcgtcttcgttggagaaggggagaactcagagctctcgttctatcaggtgaaatcgagcagcgaactcacgtggacagcaaagaggctcgcgaggcgaagcccgaagggcgagctgccgaaatccatcgtcggcaaggcctactacaatgtggcgcagttcgggccggaaattcgccgggcgtcgatattgtccaaccggccgctgagcgccaccttggcgaccgccaccaaatccgacctccacgacggcgagctttcggtcgccgatctctgctccgccgatcaggaagcgctgatgaaatcgctggaggcggacttccctgccggcttcaacaagactcacgcgacgcttctgacgttcgagcgcgttccgttcgatcttgaaagttatcgcgccacggtgcttggcaggatcgtaacgatgctggaagaactccatccggatttcgtagcggtctccagccccttctacacggccctcctcgccgcagcgggtgagtgcaccggcaataagaccaagtcggcaacggtcgaagaattgcgcaagcgtgtcgccctggaccgcgaggcgatcagccgtctgatcgtccgggttcggagcaggtcgaagaatcttgtcgagtggtggccgagcgtgaacgacgaactcgctgccgacggcacaggggcgctgcagatccagcgaatcaaaaacatgtgcatggcgtacgttaacgaccgtcgcgcggggggcaggacggctgccaagctgagcgcagcgatccgcgacgccatcggcaaaaccgcggtgagcggtatggacagcgtacttgaggcggccgtagccttgaaggcccacggtctctttgaacccgcgcccgagctttacgacctccagtccgcgatgatcgtcgaattgatggaaaccatgacatga

SEQ ID NO: 93259 - DNA, 1695 bp, Mesorhizobium plurifarium
atgccaacggtaagattcaaaaatctcttcctgttgtcgcaggtcgaagagagagcgttgcacgtaccattgcattcgcaaaagctattgattcaaggcgcaaatggctttggaaagtcggtcataatgaagagcctgtacgaggctctgggagcaacgccaaacaagattgacgaccgctggaagaatgccaacgtgtcgagctgcctcgaattcgagttcgcgggcgcgacctggttttcggtaaaagcccacggcgtgctttcgctcttcgacgacaagggcaacagacggttctggggccagcgcctggtgaaggactggggaccgaagcttgccgagttcttcggcttcaagctggagatggtggacaaggacggggaaacgttaacgccgccacccgcgtatctgttcgcaccgttctacattgaccaggacggaagctgggacaatacctgggtctccttccgcaaggacttctacctgccggaaagcgcggccacgcttgcggattatcattccggcatacggccggacggctactatgccgccaaggccgagttgacgaaggagaagatcgtcctttccagcttggagactgccgtcgagacgctccgccaggcaatgacccagatcgaagagatcgaaggcacgaccccgacctacgacttgcaggaattctccagcgagtgcgacgacctcgtcgcggaaagcgagcggcttcttgtgctgcaggcggaacatcgccggatggtgtccgacctccacgaggaaacccatcttgtcagggctgaagcggtccttctcaagaacgctctcaatgaaatgcggggcgagtttgagctcgcgtcctcattgccacgtcaggtcgagtgccccacctgcgggcacgagtaccagaactcccttgccgaaagattcgccttgatcgaggacgagggcgtcctatcgaaggcgctgaccgaggtgcagtctaagctggaaaggctggtcgaaaaggaacgggccgagcgcggcaacctagacacgatcggtgcaagcctggcgcgtgtccagaacattctcgaaacgcaaaaacagtcgctgtccctcaacgatgtgctcgtcgcggccggcaagaccgaggccgccaagctccttcgggtatcgctgaacgagaagatcgttgcggcggacgactccagaaacagaagcgagtctctgcgcgcttcgatgaacgagttcaccgacagaacgcgcaattcggagatcaggaaattttatcgcacccgactgtcgatgtattcgcaggaactggacgtccatctcgacgagccggaaaagcagtcgatcgtttccattaacgttgcgcgaggaagcgaggggccgcgggccttgctggcttactactacgcgttccttcacacgaagatcgaattcacgacgagcgtcagattccctgtcgtgatcgactccccgaaccagcaggggcaggacaagattcatcttccccagatggtgaagttcattttcgatcacgttccagacgacgcgcagaccatcgttgcgaccgaggacgcttcagggcttgaattcgaaggggtcgccatcgtcacctacggcgaagccaagcgccaaatccttcgtgaaaaagaatttgatcgggttaagaccatcttcgacccattctttcaaaagatactggcgatggagtaa

SEQ ID NO: 93260 - DNA, 1074 bp, Vibrio halioticoli NBRC 102217
atgacagacaatccacttgcagaagctcaaagggaatcagcaggggcaagtacctccgggaaatatggttttcaagttcattgggctttatgtgcaattattgataaacataaacagaaaaaagaatacgctgttttcgtcgagcaccacgaagatgttgtaatagcaaactcattagaagctgatgcagctcaatttgagttttatcaggtgaaaaatgtcggaaagccatacacatcaggagcattaactaagagagctaaaggcgcgaacagcacactaaagagttctgtgttgggtaagcttctcagctcttgtattgatactcagtatgaagaccgaatcacgactatcggattagtgtcatcaagtggttttagcttaggaatagataaagaccttaagctagacgttattaagacaggtgacattgagcgcgcagaactaggacacttaacgcaagcaattcataaagagctcaatattcttttgatacctgaacacttacactttattgtccctgaaattcaactaaaaaatcaagaagactacgtagtatcgcgttttgcttaccttgtgaacagtttattccctggagcatatagcaacccagtggacatttaccgagctgtaattgatgagatgggacgactgagtcgtttagagtatgactacaaagactgggaacggctaatagaaaataaatcattgacttctaccaatgtccaagaagtgatcactgtgcattctagttattcaggtatcgatgatctgaaaaacgagtttaatgaccttgtaggtgagttgaacttaggttctagacaacaacggactttaaaacgcgactttgcaaagcttgccttaagtcgtgccggttttatgagtgcgttggatatagaggtcactgagtcctttagaacttcctacggcaaagtagatgcaagccaatttagtgatgacgcgagtcatgtaaatgccctagttcaacaagcacaaaatgatggtctgctcacaaagatacccgatcaagacaagctaatacttgaagtcatctactgcttattaaaggcttaa

SEQ ID NO: 93261 - DNA, 1725 bp, Vibrio halioticoli NBRC 102217
atgaaaggcttgcaatttcaacgtctagttctactgtccgattcgaaaaaactggcgaatcagttcacgtttccgaagagactcaatctcgttaccggaaacgacaatagtattggtaaatcaacactagtaaagaaccttttctgggctttaggctgtgaccctcactttgacaaagactggaagtcaaatgacgttaaagccattttgtattttaaaattgaccaacgtgaatacattgttagccgttatgcagatggcatatattttggtcgcaaagacgaagcgttaaagaaatatgcaaaaataacaggtcaatttgcacaagattttgcagaagaagtcggttttgatcttatgttggcaaatagaaaggatgggctagattgcccgcctccagccttttacttcctcccattctacattgaccaaaagaagagctgggatcaaccgtggggaggatttgaagggcttggccaatacagtaatttcaaatctaccctcattaagtatttttgtggctatctatccaacgagcatttcgtgcttgaagaggataaatttgaacaaaagactattgaactagaagcaagccagcaagtaaaccgtattacagaagcaatcagcgtacttgacgaagtagcgccagaacagactattgctgtttctcaagcagagttagaatttattcagcgagagattgaagaagaactaacatccttttcagctcgccagtcagagctgtttgagaaacaatcagcgctagtaaatgaaatccatgatttagaacaacaacatcttattgccagtacttcagcaagggagctcgatgaagattatactttcgcagtagagaatgtaccgtctgactctctagaatgtcctttatgtggtgttgagcatgataactccctacttagtcgtgctggtcttttagctgacaaagaagccctagagcagcaaacgaatagtattggggctaaccttcaagaaaaatatcaacaacgtaaagaacttgccgaagagtttagtttcgttgcctctgaaatcgaacgaatcaatgaaaagtacttaaatgaggacgctccagaaaataaatgtgaaaagcagcaggcatttgagcaggtacttcatgccgtatcacaaaagaacgtaaataataacatcattccaaaaatggaaaattatcagcgtcagtcccagcaggcaaaagaaaagcagaacgatatcaaaaaggagcaaagcctacttctcaacaaaaaacagaaggacgagctcgacgagttgtttatgggtaatttagttgaaagcatcaacgcagtatctgctacgggtgtgaatcttgatggtgtcaaagctccaatggactacaagaagatcctaggtggaggggcagctgaaggaacgcgaggcatattagcctaccagctagccgttctacgccagattgacaatgcgaatcattgccagcttgctccatttgttattgatacacctaaccagcaggaacaagcaaagcatcgatatgagcaaataatgggcgtagtaagtgacaacatcccaataggctatcaagtaatcttatgcgcaatggataacgaagccttgtcttcgtacaagcaagatgctcatatcattgagctaagcgacaaccgtctactccacagtgacccatatatcgagcttcgtgctgagtatgagcgagttgtgttaagcaatagataa

SEQ ID NO: 93262 - DNA, 1044 bp, Mannheimia haemolytica USDA-ARS-USMARC-184
atgttagaaaaactgaaagaaataaaacaaagggaaacatcaggtagcgatacattccagaattatgattatcaataccattgggcaatttatacccttttagaaaattcaagagaaaatgaagatattgctattctgatagagtttcatgaagatgttattcttgtagagaatatatcttctgataatagatttcatttctttcagatcaaagctaatgacaagcatttaactttaaatgatataactaagagagaaagcggtaaaaaatctattctagataaattaactttaggaaatgagtttttagaattactaccaaatataaaatctattaaattagtttctgctaatggctttaatttttgttctggcgaagctaactttcatcaactaaaaggtgaagataaaaagaaaatagaagaaaaattgttacttgaaatagataggaatttattcttgaatcgactttattttgctgagtccaagttgcctaaagttagttttgatcaaactgtaaagggcatgctttcagatataattcaagggctttatcctgataggaaaacaaatgtaaatgcaatttacttagttttaaaagatgatttgcatgataaagggaaaactaagctactttctgttgaaaatatattacaagaaaaaggaatgagctttgcaactgtaaaatcagtgattaaacattatacagatataaaagatgataatttaatatcggctcaagaattacttgatgatagtttgtatggtgggattgaaaagcaaaagattaagaaggaattatcgaaatacagtacacatcatgtagatgcaggaagtattcaagctcaaataagattagacatattaaatactaatattttgaataaattagagaatttcgatggtcattcgtttactacaattgtggacgaattctgtgtaaatttagcttcaaaatatggtactataactacaattactgttcaaatgatcaaggctggggtcttttatgaattatcaagatacattagagagtcagcgtaa

SEQ ID NO: 93263 - DNA, 1611 bp, Mannheimia haemolytica USDA-ARS-USMARC-184
atgaaaagattaataattaagcaactaactattctttctaaagataaaaatgaaggtaatcagtttatttttcgtgatggtgtaaattttattatatctaacaaaaattcagctggaaaaacaacattgctgaacctgatatatagtgctttagggtgtgtcgtaaaatttaaggacgagtgggttgattcattcattagattagatatatctgttgaaagtgaattttatagtctttataaaacaccaaatggtgtttattacatgcaaaataggaatactttaacaaagtatattaaggattcagattatcataaagatttagcaaaaatcttaggttataaaatttaccttaaagaccgttcaggaatacctacaattacaagaccagctcatttctttttagctagctacatttctcaattgaaagggtggacttctttttttccaaattcttttgagaatttaggtgaattccaaaaatttcaagctgatttagtagaacaattttgtaaagtaaaaagtgataaagaattagaaaatgaagaagagctaaaagaactaaaaaataatttagataaaaagaagaatgagaaagaggtcctatcttcaactaaagaaagccttgaatcaagagtaggcgttaacttagatgaacttaaaaagatggctgaagactacgagcaagatttaaatgctctgcaggaagaattatctaccttagttgttgaaagacaatttttacttaatgaaattgctttttccacttcaacagctcaagaacttgaagctgactatcaagtggctagacaaaatccaagtagcatagagtgtccatattgcggtacgattcactctaatacaattactgaaaaatcagaactgttctttctaaaaacaaaattagaagatagtttaagtaatcaagagaatcagataaaaggcattactgctaagatacatgaaatagaagggaaaatatctgaaattacagagttcagacacgattctttatctattattgcagataatactagacagtttgtaaaagctatggcaattcatgggctttctgatgttttgggcgatataaagaaagatataactaatctagaagaaagacaaaaagtgataaagagcattaaaagaagaaataaaaaagagtatcaagaatataaagaatctgtaaatactttctttgtttttaagctaaaacagtatgctgataaactatctattacatttaacagttatgatgatattaaaaaagtaactgattataataaagtattaagtgcagcaaaaggtggtgctgccgatagtaatcgggtaattcttgcttattatctagcaatttatgcaaccgcaatgaattttaatactgatattcttccacctttggttcttgatactcctaatcaaaatgaacaggataaagaaaattatcaatctataataaatactttaatacaagaagaaaataaacaaattcttatttgtttaattaaaagtgaatattctgagacattaaataatgtaaacagggtgtgggttgatagaataatgaaagtaggggactatcaagattctttttctccaattcttaattag

SEQ ID NO: 93264 - DNA, 1113 bp, Chitinophaga pinensis DSM 2588
ttgactatcccaatttcttcattaaaggataaaattccaattctcataccccgagaaaatagtggatccaattcttccagcaggtttgattatcaaaaggattggagcctttgccggcttattgaattacatcagtgctcccaagattatttgttgatttttgattggcacgaggatctagtgttgatggatagtggcgaaaatcctcggaaggttgaattttatcagataaagggtaaaaagagtggaaattggacaataaattcccttataaaatcacaaaaagatgagttgggtaaccctttattgtcaatctttggaaagctttatgattgtagaaataaattttgcgatgaaacagcatcactcaactttgtatcgaacgctgtattttctgtttcacttcctgataaaaagcaaaatgttcagttagaatctgtatgcctattagacttaaacgaagtcgagcaaaagaaaattacagacaaacttaaagaagagcatccaacctttaataaaggcgagtttgtctctatcacaaatttgaaaacggtttcgctgagccttgacgatagtgctacacatgcaaaaggcgtaataactaatcttttggagcttctctacccaaatgaaaattttaatatcagttctatctatcgaagtatatttgatgaaattcgaagaaaagcgaattatagcaaatcgattacgtcgttttccgaattagttgcaaaaaaagcaataggcagaagtgaattttccaatatgcttaatgctgtaacatttttagataaatcagcaaaaacctgggagcgagtaatgaacgatctagatagttgcagtgtaccattcatagaaaagaaaaagatcaacgatggatataaaaaattgaaacttgagcaactagacccaacaaataattttctttcgaatctttggaaagccatagagttcgttcgccaggacgaaacatttgggttccaattacaggatttaaatttccaccaatgtatcattgcaatctacaatgaagttcaccgaaataataatattccaccggcgtatgataagcattttgtgttggcaatgatctcaattaaactatatgaatag

SEQ ID NO: 93265 - DNA, 1719 bp, Chitinophaga pinensis DSM 2588
atgaaaaagtttattttatcagagcttctgctgttatcgcaaaaggaccgaaaagccaaaagagtaatattcgacccgagaagaactctgatattagggagtaacggcacaggaaaatctagtctaataaaaagcgtttaccgatgttttggagcttctcccgcgacagatcatccagcttggaaagacgttgatcctattctattggcaaaattcagtattgacgataaaaaatactccatcctaaaggatgcgaaattctacgcaatatttggcgaacgtgatgaacttcttggcgcttatagttcaatcactaaaggccttggtccctttttggctgaactttttgattttaacatcaagctgcccaatcaagttggttctttaattaatcttcctcctgcttttttgtttttgccatattacatagatcaggattctggatggcagaaaagttggtcaagctttagctcacttactcttattaaaggttaccgtgaacctattgtcaattatcatacaggtataaagccgaatgagtattacgaaacgaagaacaaggttgacgaatgcaagatggcaattaaaagtttagaagctgaaaagattgtgttaaacactttactgttacaaataaaagagaagattgctgatactgactttaacgtcgatatgcaaacctttgccgaagaattaaacgaacttctatttgaatatgagcagcttaagatcgaggagggaacgtataaaaataagctactggatttatataatcaaaagattgctcttgatcaacaagctaaaatagctaaatctgctcttaaagaaactgtaaaagactatgcatacgcaagagaagaattgattgatgagcttgtggaatgtccgacttgtggagcacattatgaaaactcttttcacgaaagatttcaaattgcaaatgatgaggacaatattcgggaccttttaacggagatagaaaaagaattaagttccgttgaagaaaagattgctgcccaaaacgacaatttgtctattaataccaaaacatctgaaaggattgagctactgttaaataaaagtaaagagagtatcctacttcgcgatgtgattggaagtgcaggaagaaacgaggtgaaaagcgtatttgagctaaataatagaaatttggtggctactatttacgatagattgtctgagcaaaccaaacttgaaggtcaactaaaatctataatagataaaaacaggaaaaaggagattatagatttctatcagctgcaaatgcgaaaaaatctgcaggagttggatgttagtactttgaagcctgatgattataaaagaatcgatgctgcaattcccgaaacaggaagcgcactaccgagagcccttacagcctactacttcagtatatttgaagtgattcgaaaatactcaacgtccacattttgtcctattgtaattgattcgccaaatcagcaggcccaagacactggccatattgacaaagtgctaaattttattaataggaatcagccagaggacagtcaattgatacttggcatggaagagctctatggtgtcgattttgactgtaagatagtagagcttagggataaaggaagcttgctacaaaaagatgaatttgatgaagttaaatctattatacgaccgttcatagatctcttatctccaataaagaacagaggaaggcttttttaa

SEQ ID NO: 93266 - DNA, 1149 bp, Acidovorax citrulli
gtgcttgagacactgaaggcacacgcgaccggcgaggactacgccgtcgtacttgaatggcaggaggacatcgccgttctcaactcgtccaagcagcctacacgcgtcacgttcatccaactcaagaagaacgagtcgacgcaccactggaccttgactggactgctggctccgccaccggcacctccggcaaaagtagtgcagaccacaatagacgagacagacgctccggttgcaccaaagcgccggatagccggtcgttcgcgtaagcccggacagtccacgctggccaagctgtacttccaccgccagcgcttttccgcgctcacgccgcctccggaacttgtcttcgcttcgaacgcaccgttctacgttggagtcggggatgatgaccaagatgaaacggtgaccgcagttgagctatgcgacttgccggccgcatcagtcgccaaggtccaggaagcttttcgcaagcaactcgaattgcctgagaacgaagcgattgcccttgatggcttccgcttggcagtgaccaactgccccactgaggaggcccacaagtttgccattggcgagttggtggagctgtgtcagctcaagaaaattgagccgcaggtcaatgccccgttcattgccatttgtctcgtggcgtcgtacgtgcagcagcgagccggcaaacgagcctacgccaaggacttcgcgggcttgcttgagcgcgcagttactagagctgatgtgacgctgtacttcgctgcggccaacgacacccacgtccgaacgcaagatctggtcgcgcaagtcatcgcgcggctgaacgccgaggcggccgattacgagatagtccaggagatggaggctgcggtgaacaccgcttgcgcggaagtcaccaatcgtgccagcgtggtctggttcactgcccgagcgctggtcgacctatacgtcaagaacaaccaatacaaggcgaacggaaacctcaaggctcgactgcctgcgtggctggcggacctccgcgcgaagaaggttcgggactcacacctgtattccgatggcttcctctactgcctgatggcgatgacccttaaaaatgcacaaccactccgacacctttcaactgctgcgactggttcgcaacctgaggcagcatcatga

SEQ ID NO: 93267 - DNA, 1797 bp, Acidovorax citrulli
atgagccccatcgtggtattcaacgagctttggctgctgtccgaaagagacgcgagcgcgaggcagctgaagtttcaccctcgacgcaacctgctggcgggaagtaacggcacaggcaagtcgcgtgtactgaagcacctggtctgggcgctcggctgcgacccggcaagacgtgctgcgggcgagttcgactcgaacgtggttgccgcccttgagctgtctgttggcacgtcggggaacttcactttcttgagacaaggccgcaagcgcgccgcattcgacgagctgggcctccttgtattcgcgaccgagtccagctcgaagtggggtgagttcttctcagagacctttggcttcaaactgctgcttcagcgcaaggaggaaggtgagttcggcttggctggacccgactacgccatgcttccgttctatatcgaccaatacagcggatggggcccgaaatgggcgacctttccgtacctggggcagttcgtgaaatggcagacgccgctgttctcgtcattcaccggcttgaagaccgcggcctacctcgaggcccaggtgcatcgagaccggtcggccgctcagattaagaccgccaaggtgcacttaaagctacaggagacctcctacaagcgagtggtagagatgctcccagcggagacgaccaccattgacgagagccagttcgcgcgcgagttgcgcgaggtgtcggagttgacgaaaaagttgcgcgatgaacaagacgaggtgcgcgcggacctgttcaagcttgctcaaatgcggcagcagcttacggccgagttgaacgtagccttggccagcgaacgcgaacttgtcgaggaccaagcattcctcgccgattatgcagacgacgagccgttggtctgccccacttgctcccacgtccacactgcgacgttccacgcacgacaggcgcttgccaccgacgcgcacgatatccacgaagtggtcattcggttgcaaacggcacgagacaagctgcaaggcgatgaggcggcactccaaatcaagctcaatgctgttgccgagcggctacgctcgttgaatgagtctctaaagattcagcgcgacggacgacccgtggctgacgtcgtagtcgccaagagcctgtccgtgctcaaggacgcctacgacgtcacgcgccgcgacctcgcagcggagctcgacatcgccaccgaggagctccaagactacgacagcaggctaaaggatttggccgacaaggataaagaaaagctgattcgcgcatctttcaaggaagacctgatttcctacgccgatatgctcgacatcgcgaaggtcgaaatcgcgtcgaaggtgaagattggcacgcgctcgccgaacgcaagcgggagctacgcgccacgcgcagtattggcgaaccaccttgcgctgctgtcggtgcactcgaagcacggcgacggccccacgttcccgttcatcgttgacacaccgcaacagtcaggtcaggaccctgtgagccttgggcgcatgctcgacacaattctgaagcgagctcacttaggccaaacgatggtcgcgactgagtcgattccagacaactgggtgccgcctgaagactgcagcatcctggaatttggcgtcaagcgtcacgtcctgctggaggaagcttttcgtccaggcgtcgaggcgctcagcggcatggtcaaggcaatgcacgacgaactactgaagcaagcgccagtcggcgacgagcagccccaggacggcgacatccctgttcctgacgccgaagacgacgaggatgaatga

SEQ ID NO: 93268 - DNA, 1260 bp, Acidovorax temperans
ttgccagaaccaccgctgcagaaggtcctcacggatctctttcatgacttcgagggtgacgagatcggcggtcggcatgccattaaggggttcagctttcaggtctggcttgctgtgctcgaggcgctgcgtgcgcaccgaaagccagatgactacgcagttgtgcttgaatggcagcaagacattgccctgctgaactcctctaccgctccgacgacagttcggtttgtgcaactcaagaagaacgaatcgactctcaagtggacgctgccaagcttgctggtggttgggaatgctgaagacgatgacgctgcagtcgatacccaggatgacgctgtagtcacgccagctaccggcaaaggcaaaacgagcaagaagccgaagaaacctaagccttcgatccttgcgaagctctacgtccaccggcgtcggttcgcgggcctgacaaaggcaggactggtctttgcatcagacgccccgttcgaggtccccaaggcagcaggcggaacgtccatggtcagcggaatcccgctgaacacgctacctgtccccgctcgaaacaacattgagaagaaaattcgcgcgcagttggatgttccggccggtgagacgatcgatcttgacgatttcgagctcctcgtcactgactgccctgtcgtcgacccgcataagttcgtggcgggagagtgcgccgagatgcaactggcaaccgggctcgagctcagtgggaaagccactttgttggccgttttggtcatcgcgtcgtacgtcaacctccgtgctgcgagcacgcgtcacgcgaagaactttaacgagctactccaaagggctgtaacccgagcggaggtcactgggtacctcgctgctgcgaatgaccaagctgtgccgacctctgatcacgtccagtccgtcatcgaccgtctcaatgctgagatcgcaccgccagcggtcgtccgccaaatgcgccgggagatggcgcgagcctgcgttcaaatctcagaccgcacaaccgcaacgcccatgattgcgtcgcgattgaaagacgtctacacgactaagggcgaataccccggcgtcgcccgtttgaccgacatgttcgaaacttggtaccgcgacctagagaagcggtcgccccctgacttcggactatttaggcgcgagtacctctactgtctcatggcgatgatttacgaagatgcaaacccaaccaaacacttaccacctgttccggctgatccgcaacctgagaacgcgaaatga

SEQ ID NO: 93269 - DNA, 1836 bp, Acidovorax temperans
atgagagcgaccgtcacctttcacgcgctttggctcgtgtccgaaaaggacgcgagcgctcgaagggagaccttcagcccgagcaagaacctgttcgcggggcttaacgagacgggcaagtcgcgcgtcttaaaacacttggtttggacgcttggatgcgagcccgctgcgcgcaacgccggctcgtgggactcgaacatcactgccgcgactgagttgtcggtcggcaacaagaagtacaccctcttgcgctcggggcggcaccaacgtgctgcgttcgacgccgacgggaagttaatcctcggcactgaaagcggcaaggtctggactgagttcttcgctgagctgttcgattttccactgaagttgcagcgccagcaggaaggcatgtttggcctcgccgggcccgaatacgctgtcctgcccttctacattgaccaagagggcggctggagccgcaagtgggccacgttctctggccttggtcagtttttccggtgggagccggtggtcttcgaagcgttcaccgggctgcgcccgcagcggtatttcctcgcccaactgcgacgagacgaagtcgactacaagcttcgcgaagccaagcttcaggctcgactgcaatcgagggctttcgaccaagtcagcgcaatgctgcccgaatctaaggcgacgcttgacgagcaagttttcgccaatgagttgagagagctcgcagaccgcgtaggtgtcctgtcgaaggaagaagacgaagtccgttcagcgctggtcgaagcggcggaggaccgacaaaccaaattcgccgagttacagatggtcatgcgcgccgaggaagacctggtgggagacttggcgtatctttcgaagatccctgacgacggtcacctcacctgcccgacctgcggtcaggtgcacgacagttctttccgagcgaaggtggagcttgcgaccgacgcggaggacgcgcaccagttagtcatctcggtgcgcaaccaactcgagtctgtgcgtaagcgagaacaagacctgcgcaacaagcttcaggccgtcacgtcaagcctgcatgagctgcgtttgtcaatgactcgtcaaaaggaaggcacaacggtcagcgacatcattgctgccaagagccgtaccacgctcgagcaagcctatgaccgcactaagcgggacctttcagcgcaaatcgacgagttcaaagaagagcgagacgcgctgcaatccgagctagcagggctcacggaaaaggagcgcgagaagcaggttcgcaacgaatacaagggcgaactggacgcctacgcagactaccttggcattgccaaagctgagattggtactgtgaagattggtacacgcccgggggcgaaggcttccggtagttccggcccacgcatctacttggctatgcacatggcactgctggccttgaatagacgctacggtgaaggcccggccttcccattcatggtcgacacgccgcggcagcaaggtttagacgatgcgaacactgccaagctgctcgacaccatctacaaacacgccccgtcgcatcaagtgttcgtggccaacgaatcggtacctctgggttggacaccgccggagggatgcaaggtcatccccttcgagcacaagcgccaggtgctgaggcccgaagagtacaaggatggggttgcagcactggagccaatggtcagccaaatgcttgtggcaattgaggctgagcgagtcgtcaatgcgcaagctgagcaggcagaaggcaacgaagagcagttcgacgtagttccggatgaatcggacggcgtggacgcctccgacgactctgaagacaacgtctag

SEQ ID NO: 93270 - DNA, 1029 bp, Atopobium vaginae DSM 15829
atggatagagaaaagtactatatgaacttgccaaaagatttatctggaagcattgctaaaaatcgctttagattagaattactatggggaattagtaagataatagatgagcataaagcgaataatgagtatacgataatttttgattttaaatgtgatattgagttacataaagatgatgaattggatttttaccaaattaagacgaaaaaaagtggtaattataattcgaataatttatgtaagaaagacaagaatgagaacaactctattttagggaaattatatgctttatactcaccaaactacaatataaaattagcaattgtgtgcaataaacaacttaaaatcaaaaataaggaaattgattttcccgagcaatgttttgcagatttagatcaagatgtacttgatgatgttagagaaaagttgtgtgcagaattaaaattaaacacggtgtgcttagataatgtattttatatatttgataacatggatttattaaatccagaggattctattagagggaaattagtaaagtcttttgtggatattaaaggggaagaacctcaaaatccgaatgcattatatagactggtcgttgattctgttaaagaaaaagcttcttatgaatttgatttaggtacttatgcagatgttgtaaaaaataaaggcattacgagaagtgaatttgataaaatgttaaatgcacataaaaaagaatctaaaaatggaatcaatgaaacacaggagtatataaacaatctgccatttgctaagcgaagaagatataataccgctcttggtaatatacttgaaatacagcaaagtgagtctttacgagtaataaaaataaaaatctatgattttattgcaaaacatgaggattcattagatgatattgaaaattatttaaaagaaatatcaaaattatttaatgacgattttgatgtggaatttactaatgatatgaaatcagttcaatacataatgatttattatatgtatgcttcaggaggaatcttataa

SEQ ID NO: 93271 - DNA, 1683 bp, Atopobium vaginae DSM 15829
atgaatgttatatttgacaaaatatatatatttgatgttgtaaaaaaagaggcttattcgacagattttaaaaaaggagttaatattattacatcaagtggtatagacggaacagatagagggaaatcagttttattaagaagcttataccatgccttgggtgcagattctcactttgactcgaagtggggagaaaaagataaggtttatatattattttttaaggtggataataaaggtttttcgatttatagatctcaaaaattatttaaaatatttaatttaaaaggtaatcttatttttactactattcacagaagtgagttggcatatttttttgacaatttatttaatttttctatatggttgccgcaaaaaaatacaaatcaattagtaatagcaccacctgcatatagttttttgctgaattttttagatcaagacgaatacataggtacaaaattcaattcgtttaaaagccttgctcagtttagtaattttaagcttaatgtcatttactcacatctgggtatttataataaagaatatttcgaacttgtgaaatccaaagataaattggaacttgaaattaaaagcaagaaagaagaaattgaagaactaattaaaatgaaagacagaaccaattcaattttggatggtttttcatgtccggaaacaagtagctccttagaaaatgaacttaatatagaaactaaaaaatattcatcgctgattaatgaaatgaattcggtaagaaataagcttgttgacttgagaaatcaattagttgaacagaatatcactttgtctcaaatagctaaatttgagacaagagaagaaaaggaaataaaaaccattttaaagtcaaaagtttgtcctgaatgtcattctgttttagattcaactttggaattaaggagtaagaggtataatcatattgacaatgctcttagtctgaaagatgcaataaaaacagaaaatgcccatattgaagacgaaatactgaaaaatgaaggcgtatattcaaacttggctttggttttggaggaacatgataaaaagatttgtaaaaacaaaagggaaatcaaggattatatcaagtttagaggattaaataaactaatcgatgagattaataatgatctggcgattaatcacagaattatagacagtacaaaggaggatttgaagccactaaagaaggaatttaaaagtgttaacgataaaatcaaatctgttgatgaaaattactattatttgattgacaaactaaagataagattcaatttaaatgagttggaaagtgacagctatgagcgactatctaaaaatttttgtgcaagtggaagcaataaaccattatcaactgttatatggtatctaacactcaatgatttaaaacagaaatttaatcctgacggaacaacatttccaatggtgtttgatagtcccaataatgcggaaacagaccaggagaagaagcaggcattggtcgagtatattatggaatcatcagatcaatttagtcagttaattgtttcggcaataggattttcagaaaaagactatagcatcaattcgaatataaatataaaagttttagaaaatgaaaaatatagtttactaaatagtgagatgtatgttcaaaattatgagcttttacaatgtatgaatgatgcttga

SEQ ID NO: 93272 - DNA, 1098 bp, Leclercia adecarboxylata
atggacagcgaaacagaaatggataatccacttgcgtcacctcagcgagagtcagctggtgcagactcatatgaccgatttgagtatcaataccattgggctttatgccaagcattttcggcatattgtactaataaggacttcgcggtattcatggaatatcatgaggatgtaattattgctgactctcttgataaaaccaaggttaaatttacatttaatcaagtcaaagccaatgcctctggaagttacacaactaataatctcaccaaaagagttaacggaaaaaatggagcaaaaccatcgcttttaggaaagctttgctcttcagttcacaataaaaaatatttaaaaaatgtgattgagttgaattttgtgagcaccatcggattcaatttttcacctaaagatggtttgaaattaaggactatggggttgtcagatttggaagatattgattcaaattcgataacggcggcattgaatagcgaagtcagtggttttaaatctttccctaaagagatattaagattcgtttactccgacataccacttcaaagttattatgaacatactatcacaagaataactgatagcgttgaagtcgtatttccaaatcacttattgaagccaaaggatatttacagggttttaatggattcgctaagaattcgtgggaaagatacttttgactatgataagtgggatgaagtgatttctaataaagctttaacttataatgatatacataatgtggttacaaaaggaatttctggcgaaagctcaggcgtagatttagatgctgcgaaatacattattagtgatctggaaataagcgcattagagaaggggaagttgctaaaagctataaatttatactcgttacgtgttttatccccctcattagctatgctggatgctcaaaagagcatacgtgaagttatatctaataatcgaagcttgttaggggcggaaattactcaccaaatgcttcaaaatcttaagtctcagctggaaggtaatgtaacatcattatttgattcggacagagaatctatggcggcaattgtatatgaaattatatcgagtgatatatga

SEQ ID NO: 93273 - DNA, 1668 bp, Leclercia adecarboxylata
atgagaaaattaattttagaaaagataacaataatatctcattcaacaaaatccgcgaggcaattcgagttcggaaggaatctgactctaatcacagctgatgatggcaatagtgttgggaaatcgacattagccaaaatgttattttggtcttttggttgcgatcctctattttctcctgtctggaaagcacttgattgttcttcaatcattacgtttagtattgatgaggaatcttattcaatacatcgttataagaatgagatgagtttccgtaaagatggagagttgcttaaagtatatgacaaaattactggggctttttcagaaaaattcgcagagttggtaggttttgatgttctgctgcccaagaaaaatagctttacattggaggttcctcctcctgcatactatttccttccattttatatcgatcaaaaaagaacatgggtgaaaccgtgggattcttttacaaatttgcaacagtatagtaaatgggcacagcctgtaatatcatttcatagcgcccttatatccaaagagcattttgttgttgaaggcgatatttatgacataaaagaacaggtcaatgaagttcaaaataatattagtgaattgaacaatgcagttacgatattaaagagcaatataaaagaacaggattttaatgttgattcggaaagcttagctagtgaattaataaaatgcgaagagtccattaaactaaatctagaggaaacgtcaatagtaaaaatagatattattgaagtcgaggtacaagttaatcttgcaaaatcgataattgttgaattagataaagattacatattttctgtagagaatatgaatgaaggtagtattgagtgcccaacatgtggaacgattcatgaaaactccattgcaaatagaagtagcattcttattgataaagaattagcacaaaaacaattgggtgtactgttagaagaaaagtctcagctacaaaagactttgatgattttgagggatgaaatctctggttttaaatcccaattagcgaaacttcaagctgcatttgaaacaagtaattctagagcgtttaccgaatttgctactaataatgttgataagcaggttgaagttattgttgagaaaaaaacgtcagatctcgtttcaaagcaattgaaagaaaaaggcttaaggaaatcgcagaaagatttagtaagcaaagaacaactgaatttgataaaagaagattttgcaaatacattcttcaagtacattacaaaactaaaagttaatattgatgcttcgcttattaagagcccgcttgattataataaaatatatgaggttggtggtgcggctgaagatgctagagcggtattaggatattatttggctttatatgagcacatttcgagtcactccaaagaagtaatttcaccacttgtaattgatacacctaaccaacaagagcaatctactgaaaactataggaaaattgttgaggcaatcacccgcggtgttgatgataacaatcagtatattatttgtgcaatgcagcatggagcgttagaaaaactatccgagaatgcaaaaataattcgtctggatgaagggaaaatactcaagacttcagagtatttagatgcgaaattgtttgaaagagagtttctttttatttga

SEQ ID NO: 93274 - DNA, 1110 bp, Clostridium aceticum
atggatagaccaaataaaactgctaatgcaggggtacatggttcaacaggttttgaatttcaaaaatattgtgctttatacattttatttgataaatataaagaaattaaaaatagaaagtactttatatgtttagagcatcatgacgattttttattttgttatcagtcgaatgatgagtttattgaatctattgatgtttatcaagcaaaaaaatcttcttcagagtggaatcaaggaaaggaactgtatgaaatactaaaaaagatgttggatgtcggggcggctttacataatgataatattcctaaatgggataactattatcacaatctagagtttactacaaataactctattaagttaaataatggtataaacagaaatggcgaaagaataactgctactattaacgaatctaataatagattgaaatttatagacttaaatgaagagatagcaagcaaaatagaaacagaagttaaaaagctattaggaaaaaatttagttggtttagaggaattggataatgtttcaatggcatatattgatttacccaaaaaggataagcaacaaaaggactctttggtaggattttttaatagtttgtttggaaagaaggttagcgatcacagagcagcagtagacacattgctgctactatttagagaagttgagaatacactgaataatgggaatatcgtaaagcttatggataagtcgaaacgtgttagtagtgatatggtgaatgaagctttaaatattataactactaaaaatatggcattagaactgtggcgtgctgaaaagaaacaagcttgtgaaaaattaggaattgttatttccgagaggaagaaatttgaagaagatttttgcaattctattgatagatttaaagacaaacaacaagtagaacatcaaaagattttttcttttgtttataaaaacaaaaattatttagataattttatagaagagattgattgcattcaagctttttatgaggattttaagaataatgtgaattcactactagcaccaataactattaaagctgctatatatgcggcttacatagaagtgagggatgaactttgggaacaaaactaa

SEQ ID NO: 93275 - DNA, 1725 bp, Clostridium aceticum
ttgggaacaaaactaattataaacaaacttgttgcatacgcagaaagtaataataagtattttcattcggaatttgataatggtgttaatgttatttatggaaaaaatacatctggtaaaagtacagtttttcagttgatactatatacttttggtatcaatgataataatgactatttaaaagaaattattgacgaagaagtaataataagagtggactgccaattattaaaaaataataatacagaacaagtgatttttataagagaagatgaaactctttatataaagcgagggaaatttccaacaattaaattcaatggtataaaagcaaataattctgcagaacatattaaattaaaagaatatatgcatgaactatttgatttttctttaagattagaaaataaggatggatataatgtagctcccatagaagcaatgtttttaccctattatataccgcagtcagttgggtgggtttacctcagaaaagcttttagtggatttgaattttataaaaactttaaaaatgattatttggactattacttagggatagaatcttttgttgatagagaaaagaaacagaaacttgaactacaactaaaaagcaaagaggatgaaatgaaattttttattaatttagaacaaaataatgaagaatttttagttactaaattagtagatgaacagtttactgaattgtctaaagagtatatcggttcacatagtgaaaaccaacagatcttaattgaaaaagaagagaaatttatttctaaatgcaatgaacttagttattatttagaaagaaagtcattacttaggatgatatcaaaaaatcacaaaaagcaaaatccaattagtggaaagtgtcctagctgtaatcaagagcttccctttagtattggtgaatcctataagtatcttcaagaacaaaatgatacaaaaaaagaagttgagcattgtaaacataagataaaaagtttgcaatctgaaataaattctttaagaaaagaaatagataagcgtaaaaatcgtaaaatgaaggaatatgaaatactaaagaaatataaaaaatacaatgtttcctttgataattggttgagggataaagtaaacatacaattgattgacaacataaaacataaactaggtgaattaacatctgaaaaggaaaaaatatcaaatgatctaaaagcttttaaaacagaagaagatgttgaaagttccagattagttaagagtaaagaatttgcaaagatttttcagtcctaccttgatgaattaggtgtaaaaccactaaaagaagatcgttataaatcactatatcaaatctcagcttttccatctcagggtgtcgaacttcataaaacagtacttgcatataactttgcatttaacaaagtaatagaaaaaacagacccaattcatagatttccctttatgcttgatgcaatttttaaagaagatatagatccagcaaataaaaataaaattatagaatttattggtacgaataaaccagacgatacccaagtaatactatcaattgcagaaacaaaagaatatgaaaacaatatatatagatttaataatgattattttaatggagaagcgaaactgatatgtataggcgagttaattaaagaacgtgcatttttaagtaactatgatggtagtatagatgattatttagaggaaacatttgaaattattaattga

SEQ ID NO: 93276 - DNA, 1110 bp, Clostridium aceticum; identical to SEQ ID NO: 93274

SEQ ID NO: 93277 - DNA, 1725 bp, Clostridium aceticum; identical to SEQ ID NO: 93275

SEQ ID NO: 93278 - DNA, 1092 bp, Saccharophagus degradans 2-40
atggatgttaataatttgaatcaagctaatcctctggggcttgaaccgaaaagggaaaaatcaggaagtgacacattccgaaagtacaactatcaatatcattgggcgttctgccgcatcttggatgagcatgaggctggaaatgagtttgctctttttattgaagagcacgaagacgttactattgctgactcacttgatgttagcgaaacagcgtttgaactgaatcaagttaaagagacatccaagagacatacaattcacagcctgaccagcgtgtccaagggtgagtccaagtccttaattgagaagttagcagagagttgttgtgataagtcatattctcagagaatatctaaagtgaattttgtctcaactggaggttacagctttaatatccataaaaaaggatatagttttgaagtaattggctctggcgagctaagcaatgaagaagttaaaaaggtagaagataccatttcaaacatatctggagccgaaggttttattcctaagttagcttttgttataccatctttacctgaaagaggttttgatcttgttgttgaaggaaaaattagctcgttaataagcaagattgcccccggactaaaatacgatgcaaattctatatatgaatgtgtaatacgagacctcaacagaaaaggcgagaatagctttgactataaaaattggaatgacgctcttaaaagaaaagccataactagtggacaattatctgaagttatcgagcagcatattggccgaaagccagatgagaatatagtttctgaggtgattcaaatccttaatgatgaatattcattaaaatctttagctagaagaaatgttgttaatggatttaatcgatactatacgagaaagatttcaagcagggattcaattgtaaaagaagtttcaagcgatattgtcagatgcatagaaaacaatgctaaaaatcataccaatgcgcgcgatctagaagttgatgtgaagaaagaattaagtgaaaaaacattgggtttttttcaaacccaagaggatataacaggcgctttcttatatgagcttttagagggtgttaaaatatga

SEQ ID NO: 93279 - DNA, 1716 bp, Saccharophagus degradans 2-40
atgaaagaaatgtatttcaatcgactgacaatattaagcaagacagccaagaaagcagcccagttcgacttctcaaagagctacaacttaatactatcaaaacaaaaaaatagcgtaggtaaatcttcgctagtaaaaaatatattttggtgctttggatgtgagcctcagtttgatgacagctggaagtcgctagattgtcgtgtgattttggattttgaggtgaaaggtaagctctatcaaattgctaggcatggaaaccgatttattcttaagaaccatgaaggtaagtataaagtgttttctgcaacaggtggtgatttctcagtcgagatcatggccttgctcgagtttgacgctttgctggccgtacgagataaagatgaagttgtaacaccaccaccagcctactattttctaccattttatatagaccaaaagcaaagttgggcgaatgcttggtctagcttcaataatcttggtcagttcccaagttggaaaaagaccgtaataccttaccatactggaatgattggaaaggaatatttcgataaaacaaaagaaatatgctcaaaaaaagttgagatggcagaaactaataaagaaatagaccgttttgacaccgcaatttctgtagtaagtgagttttcagccaatagcggcatagttatcgaagaagtagagctggatgaaattgaagaagaaataagtgtcgacataatggatctacacttccaacaagaaattctttttgaagagctggcaaacctacgggcagaaaaggctcatgtagaatcacaaattgtcatagctaaacaatcgttggaggatgttgttgcggactacgaatttgccgaatgtttagatgaggatatcgaatgccccacgtgcggcgtggttcatgacaattcgatagtgaataggttctcattgtatcaggatagaaatcaagctgaagagatcattagaaggtttcaatccgacttagtgcatctagaagaagctatattagctaaggactctgcctttaaatctgtgagagagaagatagatcaattagatgagaaatactcctcagagcaggatggtaatcgaacattatcttctgttcttgatgcgatttcatctaaatcagtaagaaagaaggttgaggctaatcgaagtataaaaatcgagtctttacatcagctagatgtcgatgaaaagttattggttaaagagcgcacagctgcatcaaaggaaaccagaaaactagttaaggatgctttccaggagtacttcccgcgatatctttccaagctaaaagcatttggtgttaacactaactccgttaagtctccagagaaccacgcaaaagttgcagaaagcggtggtgccgcagaatcaacaagagcaatgcttgcttattaccttagcgtgtataaccttattcataagtttggaaatcacgttctaagtccgcttgttattgacactccaaatcaacatgagcaagctacaaagcattatgagagtatcgtgtcgttgctaattgatgatctcccagaacagtcgcagctatttgtttgcggtatggattctcagaaattagagcgtttaaaggctaaagcaaaaactatatatttagatgtagagcattctttacttaatagtgaagattttgaaaaaatcgattttgaatactcgggactatttgagaatgaagagagcgtataa

SEQ ID NO: 93280 - DNA, 1110 bp, Burkholderia cenocepacia AU 1054
gtgagagaccccaaaccgcgcctgaccaagacggcagcggcatcgagtggtacgcccgcgagcaacccgctctacgtgtctcagcgggagaaagccggcgctgctaccttcgaccgcttcaacttccagtacgactgggcgctttatgagttcctggagcagcacaagctcaatcaggtgagcatcgtattcgtcgagtttcacgaagacgtcgtcttcagctcttctctggacgctgccgacgccagattcgtgttctgccaagttaaggccggtgcgagcgcgaacttcaacaagaaatcgctcgtcaaacgaataaagcagaagccatcagtgcttgggaaaatgttcacaagcgtgggcgacaagaaaattgccgcccgggtggacaaggttcggcttgtggcaaccgggggtttcaagcttgagttagcagaaaaaggctttcaactcgaagaaatcccatgggatgcgctgcaccaagagacagcgaacgagataagcgcagctctcgcggcggaactcgggactgactgcgcgctggaaaagctccatttccataagccacagcttcccgaactgcaacaccgcagagccgtcatcgggctgatagccgaccttatcagtgaacgggtcccgaatggaggcggagactgccaggccatttaccatgttctgcaagacgaactccgccggaagggtgtccatacctgggactattccgactgggaaagtcttgtccgcaacaagggcctcactggccaacgagtggacgcactgttcgaacagtttgcgtcgtccgccacggtcgacgacctcctctcggactttgagtacgcgacggctcagctccaatacgaaccgagagaacggcgaaaactccggcagtccgctcggacttacgtcctgaacactcttgacggcgggtctctcgcacatctgcaggtacgagctgcggtgtcaagacatttgcaggccgacttcccgctaaggctgaccactgacctgttgacgagcctcgtagcggcatccccggatgtcgtgcgtgaacaccttgtcgacgaaacctcgttggtcgccgcatacatcattgaatacctgcgagcctga

SEQ ID NO: 93281 - DNA, 1704 bp, Burkholderia cenocepacia AU 1054
atgagcgcattgatattcaagcaactgttcgttcaatcgacttcccaaaagctcgcaggacgattccgattcgaacccggcttaaatctgataacaggtgatgacaattccatcggcaagtctacgctggtgcgattgccgctgtggactctaggctgcgattttgattttgacactctctgggcccccttcgatgccagaacgattctggagttcgaggttgacggtcgtacataccttgctgcacgtcatcgcaaccaaattcgcctcaaggttggcgaggagccgtggacggtctaccacagtacgagcgatgcttatgagcaggcattcgccagcatcgtccaattcggtgcggtgttaccacgccgcaaagaaaagtggattcatgaagtgccgccgcctgcctgctatttctccgctttctacgtcgaccagcgacgcggatggactgagccgtggggaagtttcgtcatccacaaatatgaggactggcgacgccctgttatcaacttccacgtgggctatcattccgcagcctatttcgaggtaggtgccgagatagcgaagggccttcagcacatcgacgccgaccagggactcattgaaaagtatggccgcgcggttgaggtcttgacgctgctcgctccaccagaagaacttccaacgaccgacgccgaactcgattcggccattgcagacatccagaattcaatggtcgccgttaagcggcgtgagcagcgtgcattgtccgttttacgtgccaagcatgaagaactcgaaattaccaaggtccagcggggaattgcacaagcggccgtggatgacatcgagaaggactacgatttcgcatctacccaactgcgcgatgatgttcttgtctgccctctatgcggcacattgcatgacaacactctcctagagcgcgcgtcgctcttgcaagaccgcgcacaggccgaacagcaggttgcgtcgctcacggctacgcagtcgaaaatcgaggcggcaatcgaaacgacactcaggcggctcgacgccgttcgcgaagaattagccaagctcaaccggcgcttcaagcgactcgacaaagacgtgaccgtcaagagcatcctcgagacgatggggaccgattcagtacgacgacgcgcggaggaggtgaccaccactgcgagattgcgattgcgtgccaacaagaaaactctcgctgagcagcgagcagcacagagtgagctcattgaggatggaaaggaagagagcatcaacgcctattaccagagcgagctggccggcctttgcgacacccttcggctctcaccggccttcgatgtacgcacggccctaccaactggatatagagaacttgccgtctcaggtggcggagcagacagctctcggatgcaattggcttatcacttgacgatgcatcgcctcattcgtcatttcaagactgaggtactcgcaccgttgattctcgacacgccaaatcagcaagaccaaggggcgctgaattatggcctcgtttcggaagaactcaagcgccgtgcgacgaaggacactcagttgtttgtatgtgcgacacgccatgccgcgatgcaaactctggagaaagactcgaccgtcattgagctcgacgagaatcgattgctttccaccgagttgtacgagcgactccaagccggcttcgtccgtgttttcggcgaatag

SEQ ID NO: 93282 - DNA, 1110 bp, Burkholderia cenocepacia HI2424; identical to SEQ ID NO: 93280

SEQ ID NO: 93283 - DNA, 1704 bp, Burkholderia cenocepacia HI2424; identical to SEQ ID NO: 93281

SEQ ID NO: 93284 - DNA, 1110 bp, Burkholderia cenocepacia; identical to SEQ ID NO: 93280

SEQ ID NO: 93285 - DNA, 1704 bp, Burkholderia cenocepacia; identical to SEQ ID NO: 93281

SEQ ID NO: 93286 - DNA, 1107 bp, Eubacterium plexicaudatum ASF492
atgttggataaacaagcaaaggacaaaaaaacaaaatttagagaaatagaagtagacacaggttctggtagtatgtcctacaatcgttttgaaatgcaagtaagccagacgttacacatggctatagaaatctttgacaatttagattatttgtttgtattggattattatgacgatattactatatttgataaagaacagaatcctgaaacggtaagctactttcagatgaaaacaaatgaagagtctattagtattaatacagcaataacaaaagattggctggttaaaatgtatgctcagttagaaaatacagattggctggttaaagagttgggactaataactaattgcccattagtagtttctgttaccacaaaaaaggatagtggaaagaatagtacggaaaggaagatttttacatctgaaaagacatctttcatggaatttaattcagtaacaatcagtaagattaaagaagatatcgccaagaaaaaaggaatagatgtaaatagtgtagatttgactaaattttttcatatgaggacaactctatcgataccaagccacagagaaattgtagagcaggaaatgggtgattttttacacagcaaatatccaagaatcaccatggattcggttaaagctatttttggtgcaatgatggatatcttgaccagacggcagcaatatgagctgttaaatgatgcagcatcgttttcggaggtcagaaataaaaaaggaatatccaagagagattttgaacgagttattgaagaagcaatgctgatttcaattcctccttttgaagaaatatcaaaagtacttagttttcaagaggatgataagtataaagcatcatacgaatatacgttgatattgtcagatgcacagacaaaatcggaaacattcacaagcttatttacaaaagttagaactatggtgaaagagaataagagagatacagccaagtcatttaaacaatattcggacgaattatgtaagaaactatattctattcaccctgacattgaacttatatataataaaacatacatatcaatattgataacgagcattacaatcagtgaaatgaggagattatga

SEQ ID NO: 93287 - DNA, 1689 bp, Eubacterium plexicaudatum ASF492
atgagggagatgtattttgataatatattaattgcagatatcgtagaaaaaacagcacattttcatggatttgaaaaagggtttaatgttgtaacaagtcaagataatcatgtaggtaaatcctctcttttgaaatcgttatattacactatgggtgcagaagtagattttgataatgtatggaataaaaacactaagctttatgtagtcgaattttacattgatgaaataaaattcagagtggcaagatggcaaaaagcatttgctctttttagagggacagaacttattttgacaacaaaaagtgtatctcgggatttagctaaagaatatgaaaaaatattttctttttctgtgtatatggcgaataaaaaaactaataaaattgaattagcgccgccggcatttacttttatgccgtactacattgatcaagacagaggctggagtggtttatatgagagtttttccaatattgatcaatataaaaagcctgaccggattaagtctctttattatcatttaggaatatatacacgttcaactgtggaattaatggcccaaaaagatgctttaaaagataagattgagcaattaaaagcagaagaagagaaaattagaattactatagactcgttatatgcagaaatacagaatttggttcctgctgactctatagaagaattagaaagaaatttgatgattcctaaagaaaggattgcatttttggtaagcagaatcggagaaacccgaaataaaattcaaagtttggaaactgctttatatcagcatgaacatcaattagaagttatacaagaatacagaaaaattaaagatggtgtcaacatacttgaagatcgagaaaatattcgcacatgtcccaaatgtggatattcttttgatgaggaaatatacagcattgttcgttcaaattataatcttcaaaacgaagattatatgtataaacagattgaacaaataatatcttcgatagcttcagagttagaaaagtataaagaaaattatgttggcttgatggacgaactcaagcagcaagaacaagcatacgatgaaaagcaagattcatatgaagtgtatctgcggcagagaggcttgcaagattctgttaagcattttacagaacaacttggaggaaacgtttatgaacaggaaaaacatggaaaggaaattaaggatatagataaagagcttagaaagctgcctaataaaaaagaggttgaggaaaattatattgaaaatgttcgtctcaacattattaaattggatgcgtggaattctgcatatgaaggaaatataaaattgcttaaaccaataaaagcacaaggtactttagagaataaaatcatattggcacaaatgataggtttgtttcagacgatgcaatactttcatactaatacaatattatttccacttgttgtagattctccaagagctaaggaagcaagtcatacaagtagcaaagatattttgaaattaatttttgaaatggataatttaccgcaggttgttttggctacaatggattatgaagattttgagaaagagatgaagcggcgagcaaaagtaacggtgctaacagaaaaaagaaaattactcaatagtgatgtatataataaatatcaaatattgatagaagatctaaaagaattattagatagtttgtaa

SEQ ID NO: 93288 - DNA, 1167 bp, Burkholderia ubonensis
atggacgtcatccatgacaaaaaaccgcgtgagacagttggtcgcaacaccgttgcaaggttccgtatgcagttccaagcagcagcctatgcggcgcttgagatcctgagcggcaaggagatcgaccgggtctactgcgattatcacgacgactttgtcgtgcgcagaaccgtagccggcgtggtcgactaccacttcttccaggtgaaaaccaagggtaaggcaaaccagcaatgggatgtcgcggaggtgttctctctcaagaagaccggggcgctggatacaaaagagaagttggaggcgatccgcaacagcatcgcgggcaagctgttcgtgcacactgtcgaatttggcgaccagtgtcgtgaaatcacggttctcagcaacgttcacttcaacgacgatgttcacgatgtcgtcacggacctctccgctggtacgtcgagcaagaagtacatccgtcagctcatcgaaaaatttgctgaaattgtttcgcctgagaccccgctgtcatccgagcaaattgatgcggctcgaaagaagctctccttgctgccgaacgttcagtacatcggcgacacgctcgaagcgttcagtattgccgcgcacaacgctatctggaggcacagcgagattgagctgcatcaacacgaggttgagcgcctcgcaagaagcttggtgacacttgtcgaggaaaagtcctgctctcccatcagcgggctatccaaggcagacatcgatctagcaactggcgtcggcctagaagacctacttgatgtcttgagcatttccacccaggtgtaccagactctacagcaagggggcgaccccgctgccatcaaagtggcgtctattcttcagcggaagctgaaggaggcgggtgccactgaatccatgatagaggcggcgtcgcgcgcgaaggttgcctgggacgtctgggttagaactgcgcggcacacattcccggatttaacgttcaacgtcttgctcgatgaagtcgacaagaagtgcaaggcatggctgcttggaggaggcgtcttgggagaccttgagaacttcgttcaagcaacgctggactccccgatcgcgaagaagttcgcggcactagatacggacctggtgttcggagccttctgtgcggccgtcgttaggagagctacgcgatga

SEQ ID NO: 93289 - DNA, 1803 bp, Burkholderia ubonensis
ttgaggctgaagtcactgcagatcgaatctctgggcgacgtgggttgggaaagcccgctcctggagtttggctacaggaccacgatgctgttcgcgcgcaacggcagcgggaagacccctgtcgtccgtgcgcttgcgtccgcgctggggttccccaacaactttcggacagacatcctcgagaaatgcaacgcggttgtcttgcgcgccgagtcggaagggaaaccgctcacgatccgccgcaccatcgacgcgacgaacgaggggttttacgccacgattgatttcgatggcgagcaaaccgaacactattcacagggttccttctcccgcgcgctgtttcggcttcttgggctgaagccgccacggctggtgtcgaccaagggcgaggaggcacagccctacatcgcaaccctgttgcccctgttctacctcatacaaggctacggatattcagctgcttaccgtgccccaagcacgttcatcgcagaccaatttgcggagatggtgcggttcgccttcgggctgaacccaaagcattcctatgaggtcaagaagacccttatcgaagagaggagtgccctcgaggcacagacacgtaaaatcgttgctgcacagcgtgtgcttgagtaccagagccgtggcgtggacgatagcgatgcaaaccaagctgtactgcaacggacggctgaaaacctgacgcagcagatcgacggacttcgtgcgtctgtggacgcgaggggaaccgcgaactcgacgctcactgaactgctgcgtcagaaggacatccaaatccgagctcggcaattagagcttttcgaactgcaaaatcgtgtcgctggcatcgagactattcgtgcggaaattgatggcgaggtcaagaccctcgggctgaacgaagaggcccggcgtgtcttcacgtcgtttcaggaaatctgccgcacgccgaactgcgggttgtttctaggtagcacggaatcgtacgggaagaacctcctgtatctcaaggaccaaatcaaggacctggagcggaacagccagcgtgccgagattcgggttgagcaattggaggagcggcttaaggagctaggcgcggagcgccagacgctcgttgacaacctcgaggggcccaatacctcggacgtcgaccagttggtgacagcggtgcaggccttgaccaagcaacttgtcggcgtgcagggcgaattgggccgaatctctgggttgaaggaagagcgctcaaagttattcaagctggagcgagaacgcgatcgtatccaggatcgcattgacgggttgtccaacaccggtagagcagacaatgagttcaacaagcttcgattgaccctccgcgaactcaccgtgaagtggatgcagacgcttgacacgcaaaacgtgtcgacaaacgtcgacatcgacttgaatcttcgttttacgttcggaggcgaaacgcttgatgtcatcggcagcggtggtagcagtagcacgacgatcagactagtcctcgccatacacgcggccctgctggaggcgtatctgtctgataagactcgtccattccgcttcattatcctcgacactccgaagcaggaagaactccacactgccgacctggcccgatacctcacggagctcgagaagatgtgcgagacaaacgatgcgcagcttatcttttcgtctacagagtacgaccatccaaccggcccgaaggacaagcgttggttgccgagttaccgcggaccggacaagccgatgtacctcggcaagccaagcgaactgctagcagacgatgagcttgcgtga

SEQ ID NO: 93290 - DNA, 1110 bp, Burkholderia ubonensis
gtggagctctgtcaggttgaaaacgatgatggtctgcacgaattcgggggtgggcacggaaacaagggcaacgactttgcccgattctggctcataagcgagttgatagcactgaccgaagtcggcacaaacgactacctctttattctagagtacgttcaagacgtcgctcgcatagacgacccggcggccccggcggcgatcacactatatcaactcaagaagaaggaaggcagcgtttgggacctcaactcgttagctggtctcactgaaaagggaaagcaggtcaaacccacgtcgccactcgcgaagattgtgaaatccgtactcggctttaagatgctgtcggcaagcgccgagttcatctccaacgcacgatttaacgtcaaacttgctgcgggcgggactgctcttcagatggactatctttccttggcagacctgcaggttgaacggcagtccaattttcgtgacagtgcagcagcagcccacgcggtaccagcggcgaccattcctcttcagaaaattggccttcggtatgcacctatcgaagtcaacgacatgcgagtacatgtcatcgggcttgctcatggattcctcaagaagctcagtatcgcacatgcggcacaggctgactcgttcgtggacgccttattcgcaaaactagcgaccgcctcacgcaacacgtccaaatgccagacgtgggaagaactggtcagtaagcgcggttacagcaagaagcagttcaacgacgcactcgccgcgctacaactgctgccggatcagcaaggtcgacgtgaaactctgctcaaggagctcgcatcagctctcgagtggcacacacgtgatcagatgaggatagaagtcgccctcaccgaactcgctcggttgaaagtcaccggtggcgaactatctattgccaacgtcgattgggctgcactgcgcgccgtgagcgcaacagcagaagctgaatcctggtcaaccgcaaaggagttcgaggccgtcgagagctgcctcaagggatttcttccggacgaatccgtcgcgcgaatacgcgcactagccatttacgggatggtccaagcatggacaagccaaacgttcgcctaa

SEQ ID NO: 93291 - DNA, 294 bp, Burkholderia ubonensis
atgaagagcacggagtcgttcttgcctagtccaattgtcatcgactcgccgaaccaaaatgcccaggatcggaagcaccttgagcgagtgatggggctgttggcgagcaaaacgccagcaaacgcacaagtcgtcctatgcgcagaagaccccagcgactcgttcaatcctgacaaggtgatccaactcgaacgagagcgtgcgttgctcgagtcagatcagatggacgaggtctctgcccgcgttctgcctttaatcgagcgcgccatcaccgaacttagtcgagcaggttag

SEQ ID NO: 93292 - DNA, 1110 bp, Burkholderia ubonensis
gtggagctctgtcaggttgaaaacgatgatggtctgcacgaattcgggggtgggcacggaaacaagggcaacgactttgcccgattctggctcataagcgagttgatagcactgaccgaagtcggcacaaacgactacctctttattctagagtacgttcaagacgtcgctcgcatagacgacccggcggccccggcggcgatcacactatatcaactcaagaagaaggaaggcagcgtttgggacctcaactcgttagctggtctcactgaaaagggaaagcaggtcaaacccacgtcgccactcgcgaagattgtgaaatccgtactcggctttaagatgctgtcggcaagcgccgagttcatctccaacgcacgatttaacgtcaaacttgctgcgggcgggactgctcttcagatggactatctttccttggcagacctgcaggttgaacggcagtccaattttcgtgacagtgcagcagcagcccacgcggtaccagcggcgaccattcctcttcagaaaattggccttcggtatgcacctctcgaagtcaacgacatgcgagtacatgtcatcgggcttgctcatggattcctcaagaagctcagtatcgcacatgcggcacaggctgactcgttcgtggacgccttattcgcaaaactagcgaccgcctcacgcaacacgtccaaatgccagacgtgggaagaactggtcagtaagcgcggttacagcaagaagcagttcaacgacgcactcgccgcgctacaactgctgccggatcagcaaggtcgacgtgaaactctgctcaaggagctcgcatcagctctcgagtggcacacacgtgatcagatgaggatagaagtcgccctcaccgaactcgctcggttgaaagtcaccggtggcgaactatctattgccaacgtcgattgggctgcactgcgcgccgtgagcgcaacagcagaagctgaatcctggtcaaccgcaaaggagttcgaggccgtcgagagctgcctcaagggatttcttccggacgaatccgtcgcgcgaatacgcgcactagccatttacgggatggtccaagcatggacaagccaaacgttcgcctaa

SEQ ID NO: 93293 - DNA, 294 bp, Burkholderia ubonensis; identical to SEQ ID NO: 93291

SEQ ID NO: 93294 - DNA, 1101 bp, Burkholderia ubonensis
atgcagttccaagcagcagcctatgcggcgcttgagatcctgagcggcaaggagatcgaccgggtctactgcgattatcacgacgactttgtcgtgcgcagaaccgtagccggcgtggtcgactaccacttcttccaggtgaaaaccaagggtaaggcaaaccagcaatgggatgtcgcggaggtgttctctctcaagaagaccggggcgctggatacaaaagagaagttggaggcgatccgcaacagcatcgcgggcaagctgttcgtgcacactgtcgaatttggcgaccagtgtcgtgaaatcacggttctcagcaacgttcacttcaacgacgatgttcacgatgtcgtcacggacctctccgctggtacgtcgagcaagaagtacatccgtcagctcatcgaaaaatttgctgaaattgtttcgcctgagaccccgctgtcatccgagcaaattgatgcggctcgaaagaagctctccttgctgccgaacgttcagtacatcggcgacacgctcgaagcgttcagtattgccgcgcacaacgctatctggaggcacagcgagattgagctgcatcaacacgaggttgagcgcctcgcaagaagcttggtgacacttgtcgaggaaaagtcctgctctcccatcagcgggctatccaaggcagacatcgatctagcaactggcgtcggcctagaagacctacttgatgtcttgagcatttccacccaggtgtaccagactctacagcaagggggcgaccccgctgccatcaaagtggcgtctattcttcagcggaagctgaaggaggcgggtgccactgaatccatgatagaggcggcgtcgcgcgcgaaggttgcctgggacgtctgggttagaactgcgcggcacacattcccggatttaacgttcaacgtcttgctcgatgaagtcgacaagaagtgcaaggcatggctgcttggaggaggcgtcttgggagaccttgagaacttcgttcaagcaacgctggactccccgatcgcgaagaagttcgcggcactagatacggacctggtgttcggagccttctgtgcggccgtcgttaggagagctacgcgatga

SEQ ID NO: 93295 - DNA, 1803 bp, Burkholderia ubonensis; identical to SEQ ID NO: 93289

SEQ ID NO: 93296 - DNA, 1101 bp, Burkholderia ubonensis
atgcagttccaagcagctgcctatgcggcgcttgagatcctgagcggcaaggagatcgaccgagtctactgcgattatcacgacgactttgtcgtgcgcagaaccgtagccggcgtggtcgactaccacttcttccaggtgaaaaccaagggtaaggcaaaccagcaatgggatgtcgcggaggtgttctctctcaagaagacaggggcgctggatacagaagagaagttggaggcgatccgcaacagcatcgcgggcaagctgttcgtgcacactgtcgaatttggtgaccagtgtcgtgaaatcacggttctcagcaacgttcacttcaacgacgatgttcacgatgtcgtcacggacctctccgctggtacgtcgagcaagaagtacatccgtcagctcatcgaaaaatttgctgaaattgtttcgcctgagaccccgctgtcatgcgagcaaattgatgcggctcgaaagaagctctccttgctgccgaacgttcagtacatcggcgacacgctcgaagcgttcagtattgccgcgcacaacgctatctggaggcacagcgagattgagctacatcaacacgaggttgagcgcctcgcaagaagcttggtgacacttgtcgaggaaaagtcctgctctcccatcagcgggctatccaaggcagacatcgatctagcaactggcgtcggcctagaagacctgcttgatgtcttgagcatttccacccaggtgtaccaaaccctgcagcaaggaggcgaccccgctgccatcaaagtggcgtctattcttcagcggaagctgaaggaggcgggtgccactgaatccatgatagaggcggcgtcgcgcgcgaaggtcgcctgggacgtctgggttagaactgcgcgacatacattcccggatttaacgttcaacgtcttgctcgatgaagtcgacaagaagtgcaaggcatggctgcttggaggaggcgtcttgggagaccttgagaacttcgttcaagcaacgctggactccccgatcgcgaagaagttcgcggcactagatgcggacctggtgttcggagccttctgtgcggccgtcgttaggagagctacgcgatga

SEQ ID NO: 93297 - DNA, 1803 bp, Burkholderia ubonensis
ttgaggctgaagtcactgcagatcgaatctctgggcgacgtgggctgggaaagcccgctcctggagtttggctacaggaccacgatgctgttcgcgcgcaacggcagcgggaagacccctgtcgtccgtgcgcttgcgtccgcgctggggttccccaacaactttcgggcagacatcctcgagaaatgcaacgcggttgtcttgcgcgccgagtcggaggggaaaccgctcacgatccgccgcaccatcgacgcgacgaacgaagggttttacgccacgattgatttcgatggcgagcaaaccgaacactattcacaggggtccttctccctcgcgctgtttcggcttcttgggctgaagccgccacggctggtgtcgacaaagggcgaggaggcacagccctacatcgcaaccctgttgcccctgttttacctcatacaaggctacggatattcagctgcctaccgtgccccaagcacgttcatcgcagaccaatttgcggagatggtgcggttcgccttcgggctgaacccaaagcactcctatgaggtcaagaagacccttatcgaagagaggagtgccctcgaggcacagacacgtaagatcgttgccgcacagcgtgtgcttgagtaccagagccgcggcgtggacgatagcgatgcaaaccaagctgcgctgcagcggacggctgaaaacctgacgcagcagatcgacggacttcgtgcgtctgtggacgcgaggggaaccgcgaactcgacgctcactgaactcctgcgtcagaaggacatccaaatccgagctcggcaattagagcttttcgaactgcaaaatcgtgtcgctggcatcgagaccatccgtgcggaaattgatggcgaggtcaagaccctcgggctgaacgaagaggcccggcgtgtcttcacgtcgtttcaggaaatctgccgcacgccgaactgcgggttgtttctaggtagcacggaatcgtacgggaagaacctgctgtatctcaaggaccaaatcaaggacctggagcggaacagccagcgtgccgagattcgggtggagcaattggaggagcggcttaaggagctaggcgcggagcgccagacgctcgttgacaacctcgaggcgcccaatacctcggacgtcgaccagttggtgacagcggtgcaggccttgaccaagcaacttgtcggcgtgcagggcgaattgggccgaatctctgggttgaaggaagagcgctcaaagttattcaagctggagcgagaacgcgatcgtatccaggatcgcattgacgggttgtccaacaccggtagagcagacaatgagttcaacaagcttcgattgaccctacgcgaactcaccgtgaagtggatgcagacgcttgacacgcaaaacgtgtcgacgaacgttgacattgacttgaatctccgttttacgttcggaggtgaaacgcttgatgtcatcggcagcggcggtagcagcagcacgacgatcagactggtcctggccatacatgcggccctgctagaggcgtatctgtctgataaatctcgtccatttcgcttcctgatcctcgacactccgaagcaggaggaactgcacactgccgacctagcacgctacctaacggaactcgagaagatgtgcgaggcaaacgatgcccagcttatcttttcgtccaccgagtatgatcatccaaccgggccgaaggacaagcgttggctaccgtgctaccgcggaccggacaagccgatgtacctcggcaagcgaagcgatctgctagcagatgatgagctcaagtga

SEQ ID NO: 93298 - DNA, 1167 bp, Burkholderia ubonensis
atggacgtcatccatgacaaaaaaccgcgcgagacagttggtcgcaccaccgttgcaaggttccgtatgcagttccaagcagctgcctatgcggcgcttgagatcctgagcggcaaggagatcgaccgagtctactgcgattatcacgacgactttgtcgtgcgcagaaccgtagccggcgtggtcgactaccacttcttccaggtgaaaaccaagggtaaggcaaaccagcaatgggatgtcgcggaggtgttctctctcaagaagacaggggcgctggatacagaagagaagttggaggcgatccgcaacagcatcgcgggcaagctgttcgtgcacactgtcgaatttggcgaccagtgtcgtgaaatcacggttctcagcaacgttcacttcaacgacgatgttcacgatgtcgtcacggacctctccgctggtacgtcgagcaagaagtacatccgtcagctcatcgaaaaatttgctgaaattgtttcgcctgagaccccgctgtcatgcgagcaaattgatgcggctcgaaagaagctctccttgctgccgaacgttcagtacatcggcgacacgctcgaagcgttcagtattgccgcgcacaacgctatctggagacacagcgagattgagctacatcaacacgaggttgagcgcctcgcaagaagcttggtgacacttgtcgaggaaaagtcctgctctcccatcagcgggctatccaaggcagacatcgatctagcaactggcgtcggcctagaagacctgcttgatgtcttgagcatttccacccaggtgtaccagaccctgcagcaaggaggcgaccccgctgccatcaaagtggcgtctattcttcagcggaagctgaaggaggcgggtgccactgaatccatgatagaggcggcgtcgcgcgcgaaggtcacctgggacgtctgggttagaactgcgcgacatacattcccggatttaacgttcaacgttttgctcgatgaagtcgacaagaagtgcaaggcatggctgcttggaggaggcgtcttgggagaccttgagaacttcgttcaagcaacgctggactccccgatcgcgaagaagttcgcggcactagatgcggacctggtgttcggagccttctgtgcggccgtcgttaggagagctacgcgatga

SEQ ID NO: 93299 - DNA, 1803 bp, Burkholderia ubonensis
ttgaggctgaagtcactgcagatcgaatctctgggcgacgtgggctgggaaagcccgctcctggagtttggctacaggaccacgatgctgttcgcgcgcaacggcagcgggaagacccctgtcgtccgtgcgcttgcgtccgcgctggggttccccaacaactttcgggcagacatcctcgagaaatgcaacgcggttgtcttgcgcgccgagtcggaggggaaaccgctcacgatccgccgcaccatcgacgcgacgaacgaagggttttacgccacgattgatttcgatggcgagcaaaccgaacactattcacaggggtccttctccctcgcactgtttcggcttcttgggctgaagccgccacggctggtgtcgacaaagggcgaggaggcacagccctacatcgcaaccctgttgcccctgttctacctcatacaaggctacggatattcagctgcctaccgtgccccaagcacgttcatcgcagaccaatttgcggagatggtgcggttcgccttcgggctgaacccaaagcactcctatgaggtcaagaagacccttatcgaagagaggagtgccctcgaggcacagacacgtaagatcgttgccgcacagcgtgtgcttgagtaccagagccgcggcgtggacgatagcgatgcaaaccaagctgcgctgcagcggacggctgaaaacctgacgcagcagatcgacggacttcgtgcgtctgtggacgcgaggggaaccgcgaactcgacgttcactgaactcctgcgtcagaaggacatccaaatccgagctcggcaattagagcttttcgaactgcaaaatcgtgtcgctggcatcgagaccatccgtgcggaaattgatggcgaggtcaagaccctcgggctgaacgaagaggcccggcgtgtcttcacgtcgtttcaggaaatctgccgcacgccgaactgcgggttgtttctaggtagcacggaatcgtacgggaagaacctgctgtatctcaaggaccaaatcaaggacctggagcggaacagccagcgtgccgagattcgggtggagcaattggaggagcggcttaaggagctaggcgcggagcgccagacgctcgttgacaacctcgaggcgcccaatacctcggacgtcgaccagttggtgacagcggtgcaggccttgaccaagcaacttgtcggcgtgcagggcgaattgggccgaatctctgggttgaaggaagagcgctcaaagttattcaagctggagcgagaacgcgatcgtatccaggatcgcattgacgggttgtccaacaccggtagagcagacaatgagttcaacaagcttcgattgaccctacgcgaactcaccgtgaagtggatgcagacgcttgacacgcaaaacgtgtcgacgaacgttgacattgacttgaatctccgttttacgttcggaggtgaaacgcttgatgtcatcggcagcggcggtagcagcagcacgacgatcagactggtcctggccatacatgcggccctgctagaggcgtatctgtctgataaatctcgtccatttcgcttcctgatcctcgacactccgaagcaggaggagctgcacactgccgacctagcacgctacctaacggagctcgagaagatgtgcgaggcaaacgatgcccagcttatcttttcgtccaccgagtatgatcatccaaccgggccgaaggacaagcgttggctaccgtgctaccgcggaccggacaagccgatgtacctcggcaagcgaagcgatccgctagcagatgatgagctcaagtga

SEQ ID NO: 93300 - DNA, 1110 bp, Burkholderia ubonensis; identical to SEQ ID NO: 93290

SEQ ID NO: 93301 - DNA, 294 bp, Burkholderia ubonensis; identical to SEQ ID NO: 93291

SEQ ID NO: 93302 - DNA, 1110 bp, Burkholderia ubonensis; identical to SEQ ID NO: 93292

SEQ ID NO: 93303 - DNA, 294 bp, Burkholderia ubonensis; identical to SEQ ID NO: 93291

SEQ ID NO: 93304 - DNA, 1167 bp, Burkholderia ubonensis; identical to SEQ ID NO: 93298

SEQ ID NO: 93305 - DNA, 1803 bp, Burkholderia ubonensis; identical to SEQ ID NO: 93299

SEQ ID NO: 93306 - DNA, 1110 bp, Burkholderia ubonensis; identical to SEQ ID NO: 93292

SEQ ID NO: 93307 - DNA, 294 bp, Burkholderia ubonensis; identical to SEQ ID NO: 93291

SEQ ID NO: 93308 - DNA, 1167 bp, Burkholderia ubonensis
atggacgtcatccatgacaaaaaaccgcgcgagacagttggtcgcaccaccgttgcaaggttccgtatgcagttccaagcagctgcctatgcggcgcttgagatcctgagcggcaaggagatcgaccgagtctactgcgattatcacgacgactttgtcgtgcgcagaaccgtagccggcgtggtcgactaccacttcttccaggtgaaaaccaagggtaaggcaaaccagcaatgggatgtcgcggaggtgttctctctcaagaagacaggggcgctggatacagaagagaagttggaggcgatccgcaacagcatcgcgggcaagctgttcgtgcacactgtcgaatttggcgaccagtgtcgtgaaatcacggttctcagcaacgttcacttcaacgacgatgttcacgatgtcgtcacggacctctccgctggtacgtcgagcaagaagtacatccgtcagctcatcgaaaaatttgctgaaattgtttcgcctgagaccccgctgtcatgcgagcaaattgatgcggctcgaaagaagctctccttgctgccgaacgttcagtacatcggcgacacgctcgaagcgttcagtattgccgcgcacaacgctatctggagacacagcgagattgagctacatcaacacgaggttgagcgcctcgcaagaagcttggtgacacttgtcgaggaaaagtcctgctctcccatcagcgggctatccaaggcagacatcgatctagcaactggcgtcggcctagaagacctgcttgatgtcttgagcatttccacccaggtgtaccagaccctgcagcaaggaggcgaccccgctgccatcaaagtggcgtctattcttcagcggaagttgaaggaggcgggtgccactgaatccatgatagaggcggcgtcgcgcgcgaaggtcacctgggacgtctgggttagaactgcgcgacatacattcccggatttaacgttcaacgttttgctcgatgaagtcgacaagaagtgcaaggcatggctgcttggaggaggcgtcttgggagaccttgagaacttcgttcaagcaacgctggactccccgatcgcgaagaagttcgcggcactagatgcggacctggtgttcggagccttctgtgcggccgtcgttaggagagctacgcgatga

SEQ ID NO: 93309 - DNA, 1803 bp, Burkholderia ubonensis; identical to SEQ ID NO: 93299

SEQ ID NO: 93310 - DNA, 1101 bp, Burkholderia ubonensis
atgcagttccaagcagctgcctatgcggcgcttgagatcctgagcggcaaggagatcgaccgagtctactgcgattatcacgacgactttgtcgtgcgcagaaccgtagccggcgtggtcgactaccacttcttccaggtgaaaaccaagggtaaggcaaaccagcaatgggatgtcgcggaggtgttctctctcaagaagacaggggcgctggatacagaagagaagttgcaggcgatccgcaacagcatcgcgggcaagctgttcgtgcacactgtcgaatttggcgaccagtgtcgtgaaatcacggttctcagcaacgttcacttcaacgacgatgttcacgatgtcgtcacggacctctccgctggtacgtcgagcaagaagtacatccgtcagctcatcgaaaaatttgctgaaattgtttcgcctgagaccccgctgtcatgcgagcaaattgatgcggctcgaaagaagctctccttgctgccgaacgttcagtacatcggcgacacgctcgaagcgttcagtattgccgcgcacaacgctatctggaggcacagcgagattgagctacatcaacacgaggttgagcgcctcgcaagaagcttggtgacacttgtcgaggaaaagtcctgctctcccatcagcgggctatccaaggcagacatcgatctagcaactggcgtcggcctagaagacctgcttgatgtcttgagcatttccacccaggtgtaccagaccctgcagcaaggaggcgaccccgctgccatcaaagtggcgtctattcttcagcggaagctgaaggaggcgggtgccactgaatccatgatagaggcggcgtcgcgcgcgaaggtcgcctgggacgtctgggttagaactgcgcgacatacattcccggatttaacgttcaacgtcttgctcgatgaagttgacaagaagtgcaaggcatggctgcttggaggaggcgtcttgggagaccttgagaacttcgttcaagcaacgctggactccccgatcgcgaagaagttcgcggcactagatgcggacctggtgttcggagccttctgtgcggccgtcgttaggagagctacgcgatga

SEQ ID NO: 93311 - DNA, 1803 bp, Burkholderia ubonensis
ttgaggctgaagtcactgcagatcgaatctctgggcgacgtgggttgggaaagcccgctcctggagtttggctacaggaccacgatgctgttcgcgcgcaacggcagcgggaagacccctgtcgtccgtgcgcttgcgtccgcgctggggttccccaacaactttcggacagacatcctcgagaaatgcaacgcggttgtcttgcgcgccgagtcggaggggaaaccgctcacgatccgccgcaccatcgacgcgacgaacgaagggttttacgccacgattgatttcgatggcgagcaaaccgaacactattcacaggggtccttctccctcgcgctgtttcggcttcttgggctgaagccgccacggctggtgtcgacaaagggcgaggaggcacagccctacatcgcaaccctgttgcccctgttctacctcatacaaggctacggatattcagctgcctaccgtgccccaagcacgttcatcgcagaccaatttgcggagatggtgcggttcgccttcgggctgaacccaaagcactcctatgaggtcaagaagacccttatcgaagagaggagtgccctcgaggcacagacacgtaagatcgttgccgcacagcgtgtgcttgagtaccagagccgcggcgtggacgatagcgatgcaaaccaagctgcgctgcagcggacggctgaaaacctgacgcagcagatcgacggacttcgtgcgtctgtggacgcgaggggaaccgcgaactcgacgctcactgaactcctgcgtcagaaggacatccaaatccgagctcggcaattagagcttttcgaactgcaaaatcgtgtcgctggcatcgagaccatccgtgcggaaattgatggcgaggtcaagaccctcgggctgaacgaagaggcccggcgtgtcttcacgtcgtttcaggaaatctgccgcacgccgaactgcgggttgtttctaggtagcacggaatcgtacgggaagaacctgctgtatctcaaggaccaaatcaaggacctggagcggaacagccagcgtgccgagattcgggtggagcaattggaggagcggcttaaggagctaggcgcggagcgccagacgctcgttgacaacctcgaggcgcccaatacctcggacgtcgaccagttggtgacagcggtgcaggccttgaccaagcaacttgtcggcgtgcagggcgaattgggccgaatctctgggttgaaggaagagcgctcaaagttattcaagctggagcgagaacgcgatcgtatccaggatcgcattgacgggttgtccaacaccggtagagcagacaatgagttcaacaagcttcgattgaccctacgcgaactcaccgtgaagtggatgcagacgcttgacacgcaaaacgtgtcgacgaacgttgacattgacttgaatctccgttttacgttcggaggtgaaacgcttgatgtcatcggcagcggcggtagcagcagcacgacgatcagactggtcctggccatacatgcggccctgctagaggcgtatctgtctgataaatctcgtccatttcgcttcctgatcctcgacactccgaagcaggaggagctgcacactgccgacctagcacgctacctaacggagctcgagaagatgtgcgaggcaaacgatgcccagcttatcttttcgtccaccgagtatgatcatccaaccgggccgaaggacaagcgttggctaccgtgctaccgcggaccggacaagccgatgtacctcggcaagcgaagcgatctgctagcagatgatgagctcaagtga

SEQ ID NO: 93312 - DNA, 1167 bp, Burkholderia ubonensis
atggacgtcatccatgacaaaaaaccgcgcgagacagttggtcgcaccaccgttgcaaggttccgtatgcagttccaagcagctgcctatgcggcgcttgagatcctgagcggcaaggagatcgaccgagtctactgcgattatcacgacgactttgtcgtgcgcagaaccgtagccggcgtggtcgactaccacttcttccaggtgaaaaccaagggtaaggcaaaccagcaatgggatgtcgcggaggtgttctctctcaagaagacaggggcgctggatacagaagagaagttgcaggcgatccgcaacagcatcgcgggcaagctgttcgtgcacactgtcgaatttggcgaccagtgtcgtgaaatcacggttctcagcaacgttcacttcaacgacgatgttcacgatgtcgtcacggacctctccgctggtacgtcgagcaagaagtacatccgtcagctcatcgaaaaatttgctgaaattgtttcgcctgagaccccgctgtcatgcgagcaaattgatgcggctcgaaagaagctctccttgctgccgaacgttcagtacatcggcgacacgctcgaagcgttcagtattgccgcgcacaacgctatctggaggcacagcgagattgagctacatcaacacgaggttgagcgcctcgcaagaagcttggtgacacttgtcgaggaaaagtcctgctctcccatcagcgggctatccaaggcagacatcgatctagcaactggcgtcggcctagaagacctgcttgatgtcttgagcatttccacccaggtgtaccagaccctgcagcaaggaggcgaccccgctgccatcaaagtggcgtctattcttcagcggaagctgaaggaggcgggtgccactgaatccatgatagaggcggcgtcgcgcgcgaaggtcgcctgggacgtctgggttagaactgcgcgacatacattcccggatttaacgttcaacgtcttgctcgatgaagttgacaagaagtgcaaggcatggctgcttggaggaggcgtcttgggagaccttgagaacttcgttcaagcaacgctggactccccgatcgcgaagaagttcgcggcactagatgcggacctggtgttcggagccttctgtgcggccgtcgttaggagagctacgcgatga

SEQ ID NO: 93313 - DNA, 1803 bp, Burkholderia ubonensis; identical to SEQ ID NO: 93311

SEQ ID NO: 93314 - DNA, 1167 bp, Burkholderia ubonensis
atggacgtcatccatgacaaaaaaccgcgcgagacagttggtcgcaccaccgttgcaaggttccgtatgcagttccaagcagctgcctatgcggcgcttgagatcctgagcggcaaggagatcgaccgagtctactgcgattatcacgacgactttgtcgtgcgcagaaccgtagccggcgtggtcgactaccacttcttccaggtgaaaaccaagggtaaggcaaaccagcaatgggatgtcgcggaggtgttctctctcaagaagacaggggcgctggatacggaagagaagttggaggcgatccgcaacagcatcgcgggcaagctgttcgtgcacactgtcgaatttggcgaccagtgtcgtgaaatcacggttctcagcaacgttcacttcaacgacgatgttcacgatgtcgtcacggacctctccgctggtacgtcgagcaagaagtacatccgtcagctcatcgaaaaatttgctgaaattgtttcgcctgagaccccgctgtcatgcgagcaaattgatgcggctcgaaagaagctctccttgctgccgaacgttcagtacatcggcgacacgctcgaagcgttcagtattgccgcgcacaacgctatctggaggcacagcgagattgagctacatcaacacgaggttgagcgcctcgcaagaagcttggtgacacttgtcgaggaaaagtcctgctctcccatcagcgggctatccaaggcagacatcgatctagcaactggcgtcggcctagaagacctgcttgatgtcttgagcatttccacccaggtgtaccagaccctgcagcaaggaggcgaccccgctgccatcaaagtggcgtctattcttcagcggaagctgaaggaggcgggtgccactgaatccatgatagaggcggcgtcgcgcgcgaaggtcgcctgggacgtctgggttagaactgcgcgacatacattcccggatttaacgttcaacgtcttgctcgatgaagtcgacaagaagtgcaaggcatggctgcttggaggaggcgtcttgggagaccttgagaacttcgttcaagcaacgctggactccccgatcgcgaagaagttcgcggcattagatacggacctggtgttcggagccttctgtgcggccgtcgttaggagagctacgcgatga

SEQ ID NO: 93315 - DNA, 552 bp, Burkholderia ubonensis
ttgaggctgaagtcactgcagatcgaatctctgggcgacgtgggttgggaaagcccgctcctggagtttggctacaggaccacgatgctgttcgcgcgcaacggcagcgggaagacccctgtcgtccgtgcgcttgcgtccgcgctggggttccccaacaactttcggacagacatcctcgagaaatgcaacgcggttgtcttgcgcgccgagtcggaggggaaaccgctcacgatccgccgcaccatcgacgcgacgaacgaagggttttacgccacgattgatttcgatggcgagcaaaccgaacactattcacaggggtccttctccctcgcgctgtttcggcttcttgggctgaagccgccacggctggtgtcgacaaagggcgaggaggcacagccctacatcgcaaccctgttgcccctgttctacctcatacaaggctacggatattcagctgcctaccgtgccccaagcacgttcatcgcagaccaatttgcggagatggtgcggttcgccttcgggctgaacccaaagcactcctatgagtga

SEQ ID NO: 93316 - DNA, 1167 bp, Burkholderia ubonensis; identical to SEQ ID NO: 93314

SEQ ID NO: 93317 - DNA, 552 bp, Burkholderia ubonensis; identical to SEQ ID NO: 93315

SEQ ID NO: 93318 - DNA, 1167 bp, Burkholderia ubonensis; identical to SEQ ID NO: 93314

SEQ ID NO: 93319 - DNA, 552 bp, Burkholderia ubonensis; identical to SEQ ID NO: 93315

SEQ ID NO: 93320 - DNA, 1167 bp, Burkholderia ubonensis; identical to SEQ ID NO: 93314

SEQ ID NO: 93321 - DNA, 552 bp, Burkholderia ubonensis; identical to SEQ ID NO: 93315

SEQ ID NO: 93322 - DNA, 1167 bp, Burkholderia ubonensis
atggacgtcatccatgacaaaaaaccgcgcgagacagttggtcgcaccaccgttgcaaggttccgtatgcagttccaagcagctgcctatgcggcgcttgagatcctgagcggcaaggagatcgaccgagtctactgcgattatcacgacgactttgtcgtgcgcagaaccgtagccggcgtggtcgactaccacttcttccaggtgaaaaccaagggtaaggcaaaccagcaatgggatgtcgcggaggtgttctctctcaagaagacaggggcgctggatacagaagagaagttggaggcgatccgcaacagcatcgcgggcaagctgttcgtgcacactgtcgaatttggcgaccagtgtcgtgaaatcacggttctcagcaacgttcacttcaacgacgatgttcacgatgtcgtcacggacctctccgctggtacgtcgagcaagaagtacatccgtcagctcatcgaaaaatttgctgaaattgtttcgcctgagaccccgctgtcatgcgagcaaattgatgcggctcgaaagaagctctccttgctgccgaacgttcagtacatcggcgacacgctcgaagcgttcagtattgccgcgcacaacgctatctggaggcacagcgagattgagctacatcaacacgaggttgagcgcctcgcaagaagcttggtgacacttgtcgaggaaaagtcctgctctcccatcagcgggctatccaaggcagacatcgatctagcaactggcgtcggcctagaagacctgcttgatgtcttgagcatttccacccaggtgtaccagaccctgcagcaaggaggcgaccccgctgccatcaaagtggcgtctattcttcagcggaagctgaaggaggcgggtgccactgaatccatgatagaggcggcgtcgcgcgcgaaggtcgcctgggacgtctgggttagaactgcgcgacatacattcccggatttaacgttcaacgtcttgctcgatgaagtcgacaagaagtgcaaggcatggctgcttggaggaggcgtcttgggagaccttgagaacttcgttcaagcaacgctggactccccgatcgcgaagaagttcgcggcactagatgcggacctggtgttcggagccttctgtgcggccgtcgttaggagagctacgcgatga

SEQ ID NO: 93323 - DNA, 1803 bp, Burkholderia ubonensis
ttgaggctgaagtcactgcagatcgaatctctgggcgacgtgggttgggaaagcccgctcctggagtttggctacaggaccacgatgctgttcgcgcgcaacggcagcgggaagacccctgtcgtccgtgcgcttgcgtccgcgctggggttccccaacaactttcggacagacatcctcgagaaatgcaacgcggttgtcttgcgcgccgagtcggaggggaaaccgctcacgatccgccgcaccatcgacgcgacgaacgaagggttttacgccacgattgatttcgatggcgagcaaaccgaacactattcacaggggtccttctccctcgcgctgtttcggcttcttgggctgaagccgccacggctggtgtcgacaaagggcgaggaggcacagccctacatcgcaaccctgttgcccctgttctacctcatacaaggctacggatattcagctgcctaccgtgccccaagcacgttcatcgcagaccaatttgcggagatggtgcggttcgccttcgggctgaacccaaagcactcctatgaggtcaagaagacccttatcgaagagaggagtgccctcgaggcacagacacgtaagatcgttgccgcacagcgtgtgcttgagtaccagagccgcggcgtggacgatagcgatgcaaaccaagctgcgctgcagcggacggctgaaaacctgacgcagcagatcgacggacttcgtgcgtctgtggacgcgaggggaaccgcgaactcgacgctcactgaactcctgcgtcagaaggacatccaaatccgagctcggcaattagagcttttcgaactgcaaaatcgtgtcgctggcatcgagaccatccgtgcggaaattgatggcgaggtcaagaccctcgggctgaacgaagaggcccggcgtgtcttcacgtcgtttcaggaaatctgccgcacgccgaactgcgggttgtttctaggtagcacggaatcgtacgggaagaacctgctgtatctcaaggaccaaatcaaggacctggagcggaacagccagcgtgccgagattcgggtggagcaattggaggagcggcttaaggagctaggcgcggagcgccagacgctcgttgacaatctcgaggcgcccaatacctcggacgtcgaccagttggtgacagcggtgcaggccttgaccaagcaacttgtcggcgtgcagggcgaattgggccgaatctctgggttgaaggaagagcgctcaaagttattcaagctggagcgagaacgcgatcgtatccaggatcgcattgacgggttgtccaacaccggtagagcagacaatgagttcaacaagcttcgattgaccctacgcgaactcaccgtgaagtggatgcagacgcttgacacgcaaaacgtgtcgacgaacgttgacattgacttgaatctccgttttacgttcggaggtgaaacgcttgatgtcatcggcagcggcggtagcagcagcacgacgatcagactggtcctggccatacatgcggccctgctagaggcgtatctgtctgataaatctcgtccatttcgcttcctgatcctcgacactccgaagcaggaggagctgcacactgccgacctagcacgctacctaacggagctcgagaagatgtgcgaggcaaacgatgcccagcttatcttttcgtccaccgagtatgatcatccaaccgggccgaaggacaagcgttggctaccatgctaccgcggaccggacaagccgatgtacctcggcaagcgaagcgatctgctagcagatgatgagctcaagtga

SEQ ID NO: 93324 - DNA, 1167 bp, Burkholderia ubonensis; identical to SEQ ID NO: 93322

SEQ ID NO: 93325 - DNA, 1803 bp, Burkholderia ubonensis; identical to SEQ ID NO: 93323

SEQ ID NO: 93326 - DNA, 1167 bp, Burkholderia ubonensis; identical to SEQ ID NO: 93312

SEQ ID NO: 93327 - DNA, 1803 bp, Burkholderia ubonensis; identical to SEQ ID NO: 93311

SEQ ID NO: 93328 - DNA, 669 bp, Proteus penneri ATCC 35198
gtggagtatcagacgagctttaagaaagcaatcaaagctcaagtaaagcttgatgactccagtatcgatctttctgttatgcgatttgttcaatcctcattaagcctaaatgaccacattacacacctaaaaggtaagttatgcgatttccttagcaagaaatttggtgatagcattagcctgaatgtcaatgcattagcgtctttgcttgaacagtcgtgtcgagaaaaatccaaggtaaaatccgcagatattattaatttttctgaacttatctcacgaaaaggtttctcatcaaaagcattgaacagtatgcttgattccttgaatgtaagtaatagtttaaagcctgattgggacaaagctagtcctctattcaatgatcttggcaaaacatcgcttcagctcattattctgcaagccatgttctcacaagtttgtatcgaccttaaccaaaatacaaaaaatccttcgactgtatatctagaatatgcaattagcctttacgatgaggcgagtgttcactcggatttgaaaatatatgtagctgaaaccatgcaaaaaattgatgcactttgtccagattatgcattaactttaaaatcagggaagaaagaatgtatcgttgtttactcaataatccagaaactatttgagggaggtgaataa

SEQ ID NO: 93329 - DNA, 1653 bp, Proteus penneri ATCC 35198
atgaaaagcatatactttaaaagtgctcacatattatctcttcgcgataagaaaggattctctttcaagttctcacctgatatcaatatcattacaggtgataatgacacaggtaaatctagctttattaagagtttatattatacattaggtgctgatgttcggctggataaaaagtggaaagaagataactttgtttcaaaagttgttatttgtgtcagtaatcgtgactatgcgtttcttcgccacgaaaaacgtatttccattttcgatataacagaaggacaagagcatcacttagtgacctcaagttctcgtacagagattgcattaactgtacgtgacatctttgatttcaatttggagcttgtgactaaaagtagtttagttcagggacaagcacaaccagcaagtctttatctcccttactatattgatcaagataacggttggggaaaagtattagattcattcagtagtttggctatgtataaggactggcaaaataatatcttgaattttcatactggtgtaaaaccaaaggagtattacactttacaaggaaagattaatttaattgatatcgatcttgttgaaatccgaacgacattaaaagctctacagagagctaagaagcggttcgaagagtcatttggaagagtacttttcgatgtggatgtaaaatattatgaagagttgctggaacgtttccttcgtaagtgccaagacctacatcaagaagagactgaatataggattaagctcataaaagtattatctctacgagatgaattactagaagaaatcgaggaatcaaaaagacagctcgatgaaaatgatatagattctttactaccatcagcaggcttagaagctagatatgcagtacttgagaacaaagaaaagctattgcaaattataccaaagttgtatgaagaaaaatctgtatatgatgatcaaatcactaaaatcaaagaagatttgaaaaatgctaaaagcctaagctcagaactcaaagacatgcttaaggaagtcaaagagcaattgtctcttcaagacattattaagtctcaagcaagtaagcaggttgaggtaactttcgatgagcaaattaatgaattattgctcaagattggtgaattggatgtcgctagaactcagttttcaaaagaaatagcaaagtacgaagataaaaagcgaacaaaagaaatcaatgataagtttaaagagtcgctgaagtttgcacaaactgagttaggtatcaaagatcctaaagttggaactattcttcaatatggtccgatttctaagagcgaaacaggtagtcgtgctccaagagcaatattggcttatcactatgctcttctcaaaacaatagaagataaatcgacaagccctatgcttccagtagtaattgattcgcctaaacagcaagatccagatccgcgcacaacgaaaaaattattcgatttatgtattaatggtttatcaactaatagtcagctaattatcggctctgtttcatttgaaagagaaacgaatcagtttaaaacgcttattatgactgaaaaatacagtctgctaaaatcggagctttacaaacaggtttatcaagaaattatgcctctttatcaacgagctgcattatcataa

SEQ ID NO: 93330 - DNA, 1077 bp, Halomonas hydrothermalis
atggtaaatagcaattcaggtgtagaagggggctctggttattcatttcagagatgctgtgttgtttttctgctatttgaaggctatgaagagatcaactcaaataattactttatttgcttggagcaccatgaagattttctattcgcatttttggatgacaatggtcagttaaaaaaaattgacacataccaagcaaagaagtcaagagatgattggaggacagacgacgatctttgcgagattattggtaaaattacgatggtaggcaaggagcttgttagcgaccccattgaaaagtctaatgattatcaacacacgttaagcttcctcaccaatagaaatatattattaacaagcaagaaagaaaagggtcaaaagcaagataagatcaaagttcaagtctcaaataaacggaaaaaatattctgacttgtcagagaaaatcaagagaaatattgaatcgaggatttgtcagtcaatacttgaaagcgctcaattagagcacgtttattttcagtatattgattttgctcaaagccacaaaaactggcaaagagaactaaaaggtttggccattgagcactttggtcaagaggttaatgaccacgaggctgttatttccacattaatgcaattattagaagatgttgcgcaatcgtataacgatgacaataaagttcttctgtctgatcaaagcaaaagaattactaaaaataaagtaagtgaaacattcaaaatgttcactgaaagcagaaaatcgtttgatttttggaggaagtattcagagcgaatttcagctcagctggatttgaaactcccaatacggcgaagagccaaagagttgcttgagaattgttttgattattttaaggatattcaacaagttgaatatcgaaaaatttataaatttgttgaagaaagaactgatgttgatgagttgcacgtgagtgaagctgattgcattgttgatttatatcaccgttatcaacaagaatttcaacctagattagaaaaccatatggtttcattcgctataattgcagcatatgttgagacaagaggaatgtatgtctaa

SEQ ID NO: 93331 - DNA, 1599 bp, Halomonas hydrothermalis
atggggataaatgactcaaaagaaaatctaaatgatattaataacagcggcgttttttttcgtcttgattgcgatataaagggccataaagaacattgtagtctggtatttattcgctcagatgacacgttggttttgaaaaagggaggtgagccacctattaggtttgatggcattaacagcaataattcatttgaatatggtaggtataaaaatattttttcaaaattaattggctttgatttggtattgcagaagcagtcggagttaattagtgcgccattagaagcagcgctattgccttattacatttcccagtccgtgggctgggtttatatacgtgagtccattggggattttagattttacaaggactttaagtttgattttttagattactattgtggcattgaaagtagtcatgaaagaatcaataaatataaccttgaaaaagaaaaaaaagagcttggctttgagctgaaacagcttaactcttatgaggataaaaatgaagagttgaaagtatcaaagctacttgatgaacgctttaaaggtgaagctgaaaagtacttagaaagttatcagggtctaaataaagacctatctggcaaagaagcagagcatacaaaattatgcaacaagttgagtatgttgagaggtcgacaaaaagtattaactcagataatagctaacattaagaatcaaaaaccaaaaattgatcaatgccctacatgtaatcaaagtttacctggtgacttgaaggagttttatctctatagccaagatgtcaatgatgctttaaaagaaaaagataatgttagagagcaaatcaaaaaaacagcagcgaagttaaactcagtagaaaatactatatccgagctgagaatcaaaataggagatgattattcggtgttgcgtcatctaaaggttagtgatattacatttgattcttggctgaatcacaatgccaatctaagaatgttaaaaaacatttcgattaagaatgatctcttgcagaaaagaattgaagttataaatggtgagatagatagagttggtaatggtgttgatatagattctttgagacaggctaaggaaagagagttcttttctatattcaaacgtaaagttttagctttgggcgctcaacttccaaaagaaagtaaatatcataacttgtattctataaattcatttccctgtcaaggcgttgagctgcataagttattgatggcctataacttttcgttttacgaaatggtttataaaaaccctgatattcataaatttccatttctccttgatgctattttcaaagaagatattgacgcagagagccgaagtaatatttttaattttctttctcaggaatctaaaactattgggcaggttattttttccgttgcggaatacaaaggagatgatgcatcacctgctcctctttttaatgttgagactattaagaatcagtatttttctgcagaaacaaaattaatatgcattggagatggcaaaacaaagcggtcatttctatccaaaagcgatttgatagatagtgagttaataaacgatacaataaatttgttggaagttgtctga

SEQ ID NO: 93332 - DNA, 1155 bp, Oscillatoria acuminata PCC 6304
atgagcgatattttaaataaaaaaccgaataatgatagtggtactgatacactggaacggtatcgttatcaagctcgaattgctttgcctttctgtttatcatgtgcgaatcagaaaggagaaaacttacgctctattgttatggaacattttgaagatattgttttggaatatagtgattattggcattttattcaagtcaaaactaggaatgcaagtcgagggctgtggaaactaaatgacgctacaggcggtttaaaaagtttatatagaacttttaatgagatttccgatccaaacgctaaatacagtttatggattgaagggacaataaaaccagatgacctcctaatggatttgacttctttaaacaatatttcaaacgagctagtagaaaaagtttctaaaaatcttgatattcaaaaagatgaatgcaagaattttttaaaatttgttacggttagggcggaactacctcctagagaatctattatatctcagaatattatgctaatgggtgacatctttaaaaatactcctgtccatcaacttaaatctttagaagaaaaactcacggatgaaatttttagagcaatgtcttgtgagcgattgccaaactatttgtatcactacatagcaaaattacaagatgctgaagaggaagtcaaaagtagaattaaagcaaaacgtttaacggcaagtaatattagcgatattattggtttggacataagtagcaattccccgattttactacaactatttaccgacctcaatgcacctaaacgaactaaactagaagaaaaacttttagtagctggagctagtgaacgtattattaagtctgcaaaaaccttacgagcaaatgcttctattcatgaagctgaaattttatcgtcaactttaatggaaaccaaagttttagtagatgttcaactgcgactggaaatattgaccgattcaattgttgaaaaactttctaatttagatgaaccagccaaaactatttggtgcgaactcctagatgaattaattaaaaaagcaagttttattgatccaaatcaaatatataaacaagatccatatttactactaggagcagcctgcgggctttctgatgaatgtcgtatcgattggggggtgaaaattgcgtaa

SEQ ID NO: 93333 - DNA, 1869 bp, Oscillatoria acuminata PCC 6304
atgaaaattcaatttaataaaatttctttgttgggtactgggcgtgattttcatctccaacctggattaaacattattactggttcaattacaactggcaaaacaactctcataaaatgctttcgaggtgttttgggttctacgttaaaaaatttttcaagagaagcacgtaaacatatcacccatctaacgggagaaatcctcattgaaaatgatgtatatgaaattatcagaccttttgttacaacaaagaatgccttagtttctatcgctggagaaaatgaggcggaacgtttgccagttttggttggtagctctgatcaacaaacttatgggacttggttgctcaagaagctcgatttaccaattttacaagttttgacagccccaactcaagaaagtagtagcaatacatcacctttgtctattaatgattatatgatgtactgctatctttcccaagatgaaattgatggaagtgtttttggacatacttaccctgcaaaaaatattaagcgcaagtatgtctttgaagtcatttatggcaaatatgatgttgaaatagctcaactaaatatagagcgcagcaaaaaacttaatgaaatccaccgcttaaaaaattatactaaaacaattgaagaatttcttgagggaacaccatttgataacaaagcacaaattgattatgatcttaacaatataattcaacgtctagaatcagtatcttcaaattcggaaactttaggacaacagattaggcattatgctaatacggatgagttgcgacaaaacttattgaaaatagagcaaaaactaactaatttaaatcgagagcgtcaaaatgaacaatatagtcttgaacaaaaagaacgtctaattaatcaattacgaacgcaaagcattcgtcttactaaagctattgttgcaggacaatacttgctagattttgactttttctcttgcccacgttgtggatcttctattcagccttctcgatctcaatctccaattgatcaatgctatctatgtttacaaaaacccgaacctcaagttactcaaaatgatttaattaaagaacaaaagcgtttgggggatcaaattactgaaactttggaattagtaacttctcatagcaacaagattgcaaatattgagcaagcaattagagactctaataaacatcgtgaaattttagtttctgaaatagatcatcggagtcgtcgctatgtttcagaacaggcagaacgcattgcactatttgaacaacaacgtactcacctgcaagagcaaaaacaacgtttagaagaatatcttgaattatataatcgccaagagcaagttatttccagtattcaacaactcgaatatgaccttgaaaaaataaacatagatattgccttagcaaacaaccaaatttccaattttgaaaattatttaaattttttagataatacttataacgaaattcttcaagaatttcacgttccttctttctccgatccaggaccatcaattattgatcgtgaaacatatttaccgcgctttgagggaaggcgttttaatgaattagaatcccaaggtcttaaggtaatggttaatattgctcatattattgcacatcaaataacgagtcttcattttaatttaaaactacccaatattttaataattgatggcctatcgggcaatatgggctatgaaggattagatcttgaacgtattgaagctatttataattatattataaaatttagcaacctatatcaaaatcgtttacaaataattatatcagataatactattccaaaagtggctgaggaatatgtattggcagaatttaacgaagacaataaacttattcctttgtaa

SEQ ID NO: 93334 - DNA, 1029 bp, Aerococcus urinaehominis
atgagctattcagactactacatgaacttgccattggatttagctggaagtagaactaaaaatagatttagagtggaattactgtggggaataagtaaattaattgatgcacacgagaaagatggtgattatacactcatatttgattttaaatgtgatatagaacttcattatgaagatggagttgagttttatcaggtaaagactatgagtagaggaaattataaccttaaaaagcttacaaaccgtacgggaaattccaattctatcttaggaaaattgtatgctttatatacacctagtgaaaaagtaaagttagcagtagtctgcaataaatatcttaaagtcggtaaaaatgaggatttgaggtccgaggtatgcttaggagagcttaataaagaatctttgaagttgatcaagcaaaagttgatagaagaattagatatcaaagatgttagtctggagaacaccttctacatatgtgatggaacggacttgaataaaccgcaccatgcgttattaggaaaattagtagaatcattcgaaaaaattaaacatgaagaacctaacaatccaaatgctttatacagacttgtttccgaaaccgctcagcagaaagcttgttacgaggagaatattacaacttatgaggatgtaaaaaaattaaaaggaatatccagagctgagtttgataaaatgcttgaatcccatagaaaaaaatcattaacaggtatcgagctaacaaggaaatacattagcggcttgcctgtcaatgaaagaagacgctataatatggctcttactgacttgttaaataatgaacatagtcatgatttaagaaacttagaagtatcgatttttgattatatattaagtaatgaagacttgataatcgatgaggattcactaattagtaatttgagtgcagaatttgacaaagaatttactgtagagtattcccaagaatttaagcatatagtctatctcaaaatattttatatatatgttgaaggaggtgacgtctattga

SEQ ID NO: 93335 - DNA, 1692 bp, Aerococcus urinaehominis
ttgaacgtgatattcgagaaaatattcatatttgatattctaacagaagaggcttttgtaactagttttgataaaggtgtaaatattatcacctcaagcagcgttgatggtacagatagaggaaaatctgttttattaagaagcttatatcatgtgcttggtgcagattctcactttgataaaaaatggaaaaatcaaaacaaggtatatttgttagaatttttagttgaaaaaaggaagtattatatttatcgacatcaaaagctctttaaagcttttgataaagatataaatataatttttcaaacattttcaagaacagaactagcagattttttgggagatatttggtcatttaaaatatttttgccaaacagggatacaaaaatgctggaacttgctccccccgcatatacctatgtaatgaattttatagatcaagatttttatgatgggaccaaatttaattcatttagaaacttgggtcaatataggaattttaaaccagacgtgatttattctcaccttggagtatataataagcaatattttgaacggataaaaaacaaacaaaacttgcttgaagaaatagcgcaatcagaatctgaatattctaaagttaatgagatgaaaataaagatatcaggattaatagggaatattatagtacctgaaaatatagaggagttagaaaatgaactatgtataaaatccaaggaatataatacgctacttgattctatgaatgaaattagatacaaattgacaaactttagaaatgaaaaatatgaactagaagtagccattagtcaaatagagaaatacagagaaactaaagagcaagaaataaatagtatttttatgaatagtacgtgtccagaatgtcatacagtcttaagtaatacgattgatttaaggagcaaacgctataattcaattgaagattcgatatatattaaagatagtatatttatagcaatgaaaaaagtggaacaaaatattattcaattggaaaatcaatatcgttatctgtcaaataaaatgcagtcatataaaaataatattaactcaacaaaggatgaaattgataattatgcaagctataagggattaaatgatttatataatagcttaaatagagatatgtatactgaatatcacaatcaattgaagttgaaagataaagtggaagatattgatgaggagttaaaaacagtaggtgaagagaaatccgatattaataaaaaatatcatgcattgattaatgaaatggtattaaaatttgggctaaacgagttagaagatagtcaatataaatctattcatagagtgttctgtgctagcggaagcaataagccaatatcaactgtcatctggtatttttctttaaataatctaaaaaaaggtattaacgcgaactcagtatttttacctatggtattagatagtcctaagaatgctgagatggacgaggataaggagcaagctttaataaaatatattttagaaggagcatctaattatgctcaattgattttttcttctataggatttaaacaaggtgattttcatttttatggtaatttaaaaatcattgagttgaataatgataagtatcagttattagataaaaagagctatatggaacaccaaccgttattggaatgggttttgaacgcgcaattaatataa

SEQ ID NO: 93336 - DNA, 1026 bp, Granulicatella elegans ATCC 700633
atgggatattcggactattatatgaatttgccattagacttagcaggtagcagaactaagaatagatttagagttgaattattgtggggtattagcaaattaattgatgcatataagcagtacgatgactatactgtcgtgtttgatttcaaatgtgacatcgagttacattatgaaaatggtctagatttttatcaggtaaaaacaaaaaatagtgggaatcacagctttaaaacactgactaatcgaaaagaaaatagtaaatctattttgggaacattatatgccctatacaatcctaatcaaaacgttaagttggctgtagtttgtaataaatatttgaagattgctaggaatgaagaactaagaaaagagatatgtttaggggagttggataaaacagtaatagattttattcaagataaattgaaagaagaactgaatttgtcagatgttgttcttgacaatgttttttatatttgtgaaggtatagatttaataaatcctcactacgctttgattggaaagttaattgaatcttttcaagaaattaaaaatgaagaacctaataatccgaacgctttatatagattagtatctgagacagcccagaaaaaagcttcttatgagatggcaataactaattataatgatgttctagagttgaaggggatttctaaagatgagtttaataaaatgcttgaatctcataggaaaaaatctataaccggtattgagcaagctaaaaattatattaaaactttatatccagccgaaagaagaatgtataatcaagctttaactaatttgatagaaattgatcatagttatgatttgaatgtattaaaggcatcagtttttaaatatattgaaggaaatatagataagattaaaaatgaagatgaacttttttgtgttttaagcccaatatttgatggagaatttcagatggaatatacacaaattatgaagaatgtattttacttattagtcttttatatatacatagagggaggtgaaatttaa

SEQ ID NO: 93337 - DNA, 1692 bp, Granulicatella elegans ATCC 700633
atgaatgtaatttttaaaaaaatatatatttttgatattttaactaaaaaagcttttgttacaagctttgaaaaaggagtaaatattgttacttctagcagtattgatggaacagatagaggaaaatcggtattgttgcgtagtttatatcatgttatgggagctgatgcccacttcgataaaaaatggaaaaatgaagacaaagtatatcttttagagttttttgttgataataaaaaatattttatatatagacatagaaagttatttaaggtatttaatgatcttattcagatattatttcaaacatcatctaggacagaattatcagagtttttaggtgaaatttggtcttttgaaatatttttgcctaatagaaatactgagaagttagagattgccccaccagcgtatacatatgtgatgaattttcttgatcaagactattatgatggaaccaatttcaattcttttaaaagtttaggacaatatcgaaatttcaaaccagatgtgatctactcccaacttggaatatatgataagagctattttgagcgtgttaaaattaaacaaaatttatttgaacgcattaatgactctaaagaatcatataaaaaatcggatgaaatgaagggaaaagtatctaatttattagagaatgtagttgttcctgaaaatttagaagagctcgaaagagaactttctattagatcaaaggaatataatgatatattgcattctatgaatgagtttagatataaacttactaatttaagaaatgagaaatatgagctagagattgcattgaaccaaattgagagatttaaaaatagtaaagaaaaagaagtaaagtttattttagagacggatatctgtcctcaatgtcattcatttttgaatgataccactgatctaaggagcaaaagatataattcaatagagacttcaatatatataagtgacagcatctacgaagatatagaacagatttcaaaagtgatttcgaaaattgagagtagttatagagagttttcaaatagattggaatcatataagaaaaatattgattctgctcaggaagaaatcaaaaattataccagttatattggattaaatgagctttataatagcttgaatctggaattgtttagtgaattgcaattacaagaagaacttaaagatagaatagaaaatatcgaagaagaactaaaaaaagtatctgaaataaaagctgatattaataacaagtattatgagatggtagatagccaagtgttgagattcggattgaatgaattggaggagtcacaatataaagcgattaatcgtgtgttttgtgctagtggaagtaataaacctatttcaacggttatatggtatttcattcttaataatcttaaagtatgtttcaataaaaaatctttgaagttaccaatggtattggacagtcctaagaatgcagagatggattattataaagaacaagctttaattgaatatatattggagaattcatccaaatatacgcaactcattttttcatcaattggatttgaaagaacgaagtttatatttgaaggggaaataaaaattattgagctaaaaaatgataaatatcagttgcttaattctgaaactttcaaagaatatgaagatattttagaaaatgttttaagtgctcaattgatgtaa

SEQ ID NO: 93338 - DNA, 702 bp, Lactobacillus iners LactinV 01V1-a
gtgtgtaataaacaacttaaaatcaataataaagaaattgattttcctgagcaatgttttggggatttagatcaggatgtacttgatgatgttaggaaaaagttgtgtacagaattaaatttagaaactgtgtgtttagataatgtgttttatatatttgataacatggatttattaaatccagaggattctattagagggaaattagtaaaatctttcgttgatattaaaggtgaagaacctcaaaatccgaatgcattgtatagactggttgttgattctgttaaagaaaaagcttcttatgaatttgattctggtacttatgaagatgttgtaaaaaacaaaggtattacaagaagtgaatttgataaaatgttaaatgcacataaaaaggaatctaaaaatggagtcaatgaaacacaggagtacataaataacttgtcatttgctaaacgaagaagatataatacagcgcttggtaatatacttgaaatgcagcaaagtgagtctttacgattaataaaaataaaaatttataattatattgtggaacatgaagattcgttagacgatattgaaagttatttaaaagaaatatcaaaattatttgatgacgattttgatgtggaatttactgatgatatgaaatcggttcaatacataatgatttattatatgtatgcttcaggaggaattttataa

SEQ ID NO: 93339 - DNA, 447 bp, Lactobacillus iners LactinV 01V1-a
atgaatgttatatttgacaaaatatatatatttgatgttgtaaaaaaagaggcttattcaacagaattcaaaaaaggagttaatattattacatcgagtgatatagacggaacagatagaggaaaatcagttttattaagaagtttataccatgccttgggtgcggattctcactttgacttgaagtggggagaaaaggataaggtctatattttatcttttaaggtggatgataaagatttttcgatttatagatctcaaaaattatttaaaatatttaatgcaaaaggtgatcttatttttactactattcatagaagtaaattagcagatttttttgggaatttatttaatttttctatatggctaccacaaaaaaatacaaatcaattagtaatagcaccacctgcatatagttttttgttgaatttttttagatcaagatga

SEQ ID NO: 93340 - DNA, 753 bp, Aliiroseovarius crassostreae
atgtatgaaaatgtgatttcatttggcgacagcgtggaatcagcaacatttctttcaaatgcaccagcaaacttttcgccagcgaacaaatcaaatttttgcctgagcgagtgcgacgacgaaagtctcaaaaaaatcactaaaaaacttgaggaagaattctcaggtgaagacaccattaagagtgagctactttgggtctcacaaacagacctaagtttggaagatgcggacgcgcacgcgaaaggtaagttggatgccttcgtggttgaaaatttgggtgaggtcgagttttctttggcggcgttgttcaaagcggtttctgaggaatgcgatagaaaatcgcgtgccgcagatgttgatctaagcgatttcgatgaagttgtgtcgcgccgcggcataactcgagttgacacagacagttggttgcaaatcgtttcttctactgtgaactgcccaaagtgggaacagattgcacctgatattcaattgccagcactgcaaaaaattcgcttggggcaggaatggaacgcctatcgtgttgcagttctaaatccaaatgaggcagtgcggaaagtgcgtcgcatgatctcaaactatatccaggacaacgacttggatgcactgagtttgaacgagctagtaaaccaagtttatgcagcggtcgcatcagaagctcgagcggagctaagaacagccacggaccaacgaataagggcgatgattttatatgaagcgtattcaatcgactaa

SEQ ID NO: 93341 - DNA, 1695 bp, Aliiroseovarius crassostreae
atgaaaaggctgaaattcagaaaactctggctgctatcaagtcgcgaaaagaaagcgagagttgaggattttagcaacctgacaacagctgttgtggctgacaatgactttgggaaatctagtctggtaaaatctttatacgctacgctgggtgctgatccttccagaacgccagaaccttggaaaaatgccaaagtcgagtctcttcttgagattgaagtggacgggagcatattctttgtcctcaagcaagcagggcgctttgcactgtttgatgaggggggtaagcttacttggacaggaaactcagtcgtcaaagcgctagctccaaaggtaggggagcttttagactttgaggtgacactgaagctaaaagggggaaagaatgctgttcctccaccagccttctgctttctgccattctatctggaccaagaaaaggggtgggtagatacttgggcatctttttctgggcttgaaatggtcagcgcctataaggacgatatcgcgcgttaccacactggtatccgaccaaaagaatactatcgatccaaggcagcaaaggatgaggcaacagttgaaaggggggagcttgctcaggaaagagcagcgcttaccaaagctaggaagaggtttaaggataagcggaaacatgttggaatttcattagatgtgggtacttttgaggacagaattaaagcgctgttgaaagaacaaaatgcgctgcaaaaatcttatgatgaaattcgcaatgaaatttcacatttgcaggctcaaagaaccgcctcgcaagaagaagtggaaattgccgctagggttttgtctgagctggaagcggacataaaattttctcaaaagttaagcgatgctgagattgtatgccctgtttgcagtactgttcatgaaaacgactttgcaaatcgctttggtctgcacaatgacgctgacgcgtgcaggattgttcttttggagtcgcgagggaaagttgaaaaactggaatctgaaatatcgctccaactgaagagtatcccagcacttcaaacccgtattgaccaaattcagtccatacttgaagagacaaggggacaaatcaaacttggcgacatgttgcgcgacgagagcgagcgcttggtagatggtacttttgaagaagaagagcgcgctattgacggcgatattggcgtgctgaacgaaaaaattgctgcggccaagaaagagatgagtgctttcgaaaagaaagaacataaggacaaaataatagaattctacgcgggcaaattacgagaattttgtacgaaacttggtgttgaaaacgttccaagcaatatgtgggataatattcgccccacaattcgagagacaggaaacagggcgccgcggctgatactcgcctactgctatgccgttttgcatacgatcaatgagttctctacttcgtgtttctgcccaatcgtcgtggatactccacttcagcaggatccagatcctaagaattcagaacgaatgatcagttttgcgataaatgaaagaccaaagggaagccagttggttcttgcgactggaagtttgcagggagtgaattttgaagggcgggaaattaatcctgtgaacaaagagcagttgctacaagctgagcagtacgagccagttcgcaagtttatgttgccgtttctcaacgcagttctcacggactag

SEQ ID NO: 93342 - DNA, 1131 bp, Cedecea davisae DSM 4568; identical to SEQ ID NO: 92450

SEQ ID NO: 93343 - DNA, 1653 bp, Cedecea davisae DSM 4568; identical to SEQ ID NO: 92479

SEQ ID NO: 93344 - DNA, 1110 bp, Cedecea neteri
gtggctaaaaataaagcggcaaacgccggggttgatgcgttaactggttttgagtttcaaagaaactgtgcattgtatcttttgttagataatttcaattcttttatcaataaagagttctttatttgtatcgaacatcacgatgattttctattttgttataaaactgattgcttaagttatataaacgagatacatgcctatcaagcaaagaaacttagcgggaaaatatggactatcgattctaggttttctgagatggtatctaaaatactattggtgggcgaaaacttaagaaatgatgcttttgaaaaaagtgaagattataaacaccagctaacatttatatcaaatacagaaatagaattaaaatactcaccgtcaaaggcgttaaaaaaagaaggtattactgagcagatattaaggattaatgagcaaaactctatctgtgcttatgatgaattacataaaaacattcagaataaaattgaagagaaagttacagatatttgtaatgaagaatcttctgttttccatcgtaaagaactaagtaacctaaaaattcagtgggtagattttccaagaacagctgcaaaacaaaaagagtcgcttattggacttatgtctagaaagttttctcatatagctgacccgaaagcagccatcgaggtaatacttgctctatttagaaatgtggaaactgtatataatcaagggcaggaaatatgtctactcgatccaacaaaaagggttgaaggcgaagatgttaagaaagttatgaatataattgattcacagcaaaaggcattcgactattggcgtgacgaagcacagcaattctcaatgaaattcagaataccacttagcatacagaaaaatcatgaaaactatatacttaactcttttgaactactcaaggatatgagtaattacgattatcaaatcattaaagactttgttagaaataatgattacacaactcaatatttttctcttcaagacgcattaactgcatatgttgataatgttagaaaatctcattctataaacctagataatattgatacattttttgcagttctgtgttcatacgttgagtgctacgattaa

SEQ ID NO: 93345 - DNA, 1764 bp, Cedecea neteri
atgaagacaattataaagtttgatagattgtttgttgtctctgaaagtcataatttatatttcgaccaaaagttttcaaataaaataaacataataagtgggtgtaatacctcaggtaaaagcactttaatacagagtattttatttacctttggaattaacgatgttaaagatggcttgagcgaaattattcgatacaaccctacgttcagattggatttcagcatcactaaaggaggcgtagataaaaaatatataattgtaagagagcttggtagcatatatttaaaagaggatgggggaaatgtttttagttttcatggaattgactctgatggtcgagttgaacatgtgaagcttaaggagatgttatctcaattattttattttaacatgcttttagaacagaagggtgagctaaaaaaagcatcgatagaatgcatgttcctgccttattatatttctcaatctgtagggtgggtttatttaagagagtcattctctaatcttggtttttataaagactttaaagatacgtatcttgattattatcttggcatagaaaattcttttgataaagaacatttttataaattaacaaaagagcggacacaacttcagtcgaagatctcctcattgaataaatatagcgccgagcctcactttgttgtttctaaattactggatgaagagtttggtgatgaggctcagaagtatatagatggttatattaaattagtagcatcattagatgaagaacgtgatgtatatactggtttgtgtaataagttatccttaactaaaaatcatgtcaagatactaagaagaactaaaagaaatattaaaaaccaaaactataacaatattgatcgttgtcctgcatgtacgcaaatacttccttattccttagaagggttatatggttattatcaaaacatcaatgatactaataaactatcggagcaaataaataataaaatacaaaaaatacagtctgacattaatggttcacttgcgaagattaaaaagttagaaattgatatatcttcaaagtattcatattttcttgagaaaaaatcacaaaatttatctgtcaacacatggatcgataataaagcaaacatacgtctgttaggcaatattcatgaagagatagaagaatatacaaaaaggtctgatgaaattaaaggattaattgatgggatgggagaggagcagtctctttttgtcgagcggtttaacaaagaaaaagatttcaaggaaatatttaaaaaatatcttaatgatatgcagttgttcaatgtaacagaacctagatatacagatctttataaaataaattcatttccttttcaaggtgttgaacttcataaaactgtaatgtcatatcattttgcattaaattctttaataagaaaaacagacaatatacatcgacttccatttatgcttgacgcaattcttaaggaagatatcgatgacagaaattttgatctcatactgtcgtttgtgggaaaaaatcttccgactgatactcaatcatttatatcaatgtctgagtatgctgaagataacctcttgaaagatggtaaagagataagtgcattccgaagatccaaggttaaagatattaaaaatcgatacttccctgatggtacgaatttattctttattggtgatgggaagcgtgagagagcatttttatcaaaacctttggatttaaacctcgatattttcgttgatacatgtcggcttactgaatga

SEQ ID NO: 93346 - DNA, 1122 bp, Paenibacillus terrae
ttgcaaaatatacttgcctcagaactaagagaacaagctggctctaatagcttcaatagatttgattatcaagctcattggatagtacaccatatgataattgaatttaagaaaaattctcaattcttagttatttgtgaatttcatgacgacatgactaaagtttccgacatacagaatccaaattgcgcggaatttttccaaataaaaacaactgctcaatataagaaatggtcattaccataccttactaaaacaactactaaaagaagcggtgctgtaaaaaacagctttctaggttttttgttttataactttctgaaatttaaaacagaatgtagtaaatgtcactttgtatctaacattggggtagatgcggaaataagaaagtggcagtccatcattgaagatggcaagctgctaaaaacaactgaccctgctctgtactcaaaaattaaaaacctaatcaagagtgagtttaataatattgacttaaatgagtttgaacatatattcgataacttcgtacaggacacctatgtttatgatggtgatctacctcttgaaaattatgaaaaagtcgtagcgggcgaattttttaaaatgctggaaaatgatgagttgtatacttcgaacagtaacaagattttaaaagacattattgaagatgtacggaaaaagagcaaaacaaaaattgaagttcctataagttatagcaaattagtagaaaaaaaaggtgtatcatcagatgtattttccgctttgcaaacgaatatgaaaaagatttcttcccaaagctattttagagaacttgaagaatttctgactgatagtggattatctttaccgaaaagaagattacttctgcgagaattgaaagaacataaactaaaaatgttagacattaataagttgttatatcaggacgtatcttttcaaataattgctgtaatagatgagatcctcttgaaacaatatgcaagaattgatgatatattttatttgttagacgaagtaaaaaaacaatgtgagaactttatcaaggataacattgatttcaatattccccttgtggaggctatgttttatgaaagacttatttcggaaaacacaacaatataa

SEQ ID NO: 93347 - DNA, 1692 bp, Paenibacillus terrae
atggaaagattgttgataaaaaaactaatagtaataagtgatgtggaagagtcatcaaaagagatcagctttcttgaggggctaaatttaataatcggtgaaaataaaactggtaaatcttctttaatcaaaagtatcttttattccctgggctgcgaacttatttttgaggatgattggaagaaccttgttcaaaaatatgttttattctttgattatggggaaaaaaaatattgcactattcgggaaaaggagaacattaagctctttaacattgtcaatgaatcaaagtttatagttctgtcagataataaatcttatcatgaattttgtatggcattgatgcaagagctagatgtttctatggattgtctaaccataaatggcctagaagtttccattactactccattactatttagatttcagtacatagaccaagattctgggtggtctaaaataggcgaaagtttttcgaatatgaagtacattaaagattggaaggggaatactaataaatatgtagtaggataccaagaaaacaagtattacaaagagaaaaataatattttgaaaattaataaaactatccaagaattaattataaagcttaagtactttaacgaacttctaaagacaattcaaatgaatatagaggtaagtaatacagaaaacaacataattttagaaaatagccaggtcaagcttgctttttcagaacttgataatttagaaagaagaaaaataaaactggaagagagtatttcggaactcaaaaacatagagtatgaaaaaaaccttcaattggctactttaaaggagtatattaaagaactcgataaagatcatacgtatgcaatgacacaagaagaaaaaattatctgtcctacgtgcggtacagtccataataataaagtaatagacaggctggaaattgttaaagatattcaatctggcaacgaattaattaagcaaataagaaatgaattaaaagaactagattttaaaattagtggtctactggaagaaaaaaatcaggtgaataaaagatatagctttctaaaaagacaaattgaacgaagcaaagaattagccactgttgccaacacctttcggaatgaaggtaaacaagaaattgtttttactgggaagcttgaaagggacaagattatgaaattgataatagaagaggaacgcaacgtaaaaaaaattaaagagaagataaaagagtttaattcacccgaaagaaggaataaaattttaactgatcttaaaacaacatacgaaggaatcttaaaggagcttaatatacctttgaaaactttgaaattaaaagattttgtacaggagctaacaaagactggaagtgaaaagccgaggattatttatgcctatcatgttgctctgtacctttataatcttgatcgaatggtcagtccattcaatttcttggttatagatacccccaatcaacaaggccaggattggaaaaacttaaaaagtattgatgaagttcttggatatcttttagataagcgtggacaggttattattggtacagaaagagagacgggatacgaagaggaagctagtatagtcattcgattaatgcaagagagaagaactttaaataaaaaggattatacaagccatattgaactttttagaaatcttgaaaaattagaatcgtaa

SEQ ID NO: 93348 - DNA, 1128 bp, Methylobacter tundripaludum SV96
atgagggaggcagtattggatacagcgcataacaggctccaaagcaacccactggcttcacctcaacgtgaaacagcaggtccaaggacattcgaaaaatacgagtaccaatatcattgggcgctatgccggattcttggtgctcatgaactttcaaatgactatgtggtgtttattgaacttcacgaggatgtagttttggccacctcctctgacgtcgcccttgccgaattcgagttcaaccaagtaaagaacgtcagcacccctccttggaattggaggaaattgactttgaggccgaagggccgcacaaaaaaagaaaagaattcggtccttgggaaaatgctgctaggtgtttgcgacaagccgtttattgataaactcaactcaataaatcttgtcgccacatgtggatttaaccttccgcctaaaacagaaggcttaaagctttcaataatttcgattggcgaaatccacgatgaatgtataaatgatattcaatcagcaatcgataaagagcttgggtcgcatcctctgccaaagatgttaacgttcatcaccccggacttgcccagcacaggatttcaggatgccgcaattggacgcatatcgaaacttgtcgaactctcagtgccaggagcaaagtgcagcgcacaatcaatttatcgggttctgatagatgatctccatcgcaaaggtagtgtggcgtttgactatactcagtggagcaaccttgtgaaaaacaagggaatgacgtatcaggatgtggagcgggtaatctctgcctatacggaaaacaagggtatagagagcttcagttctgacttcgataatattactgaagaaatgggcctgaagttcaacaagaaagttggcctaagaagagcgcttgagcgataccacaacgcagttcgcctggagcgctcgctaatcgccatggacaaacagcaagcagtgaaagcggctgttgagaataatttttctgtgtttgatgaacacggcgctgtatctctgattgaggcggctctgggagcattacctgaaaacgtgaaaaaaaacctcattgatttagaatcagcacaagctgcaattatttacgagttaatttccaagtgccatgaaaaataa

SEQ ID NO: 93349 - DNA, 1737 bp, Methylobacter tundripaludum SV96
atgccaaacttagtattcaaacgtctaacgatagcgtccgatacactaaagtcggcaaatcaatacaacttcaaaccacgattcaatctaataacagggaacgacaatagtattggcaagtcgacgctcgccaaactattgttctggactctaggcggagaccctagccttgactttacttggcagtctttcgatgttcgtgctcttgttgatttcagcatcggaaatgctgcataccaagttggcagatacggcaacacgatgtttctcagacgccctgatggtgactgggagagatttcaaaaaataactggtgaatattccgaggtctttgctgagattacaaaatttagtgcgctattaccaaaccgaaaagaaaccactacattagaaagtccgcctcctgcgtactattttcttcctttttatgtagaccagcagcgtagttggtcgcagacttggaacagtttccccaatcttgcacaatacgcaagatggcagaaaaccattattcagtatcacacaggttatctgcggcccgagttcttttctatcgaggaaaagattgctcaaagcacccttgagaaaaaaaacgcagagtctgaggtcaagaagattgagactgccatcgaggtagttaaagcctatattccaacgaacgagaagactgttgctctaacaaacagcgagttcgatgagctctctgctgaagtctgtatcgaaatatcaaagctacaagctacgcaagaagagttgtttagaatgatcgctgaaattcaaactgagcgaatctatctccaaggacaacttgatcttgcaaaactagcttctgccgaactcgaaaaggactacaccttctcagtagagtgcgtggccggtgaaacactcatttgccctctgtgcggcacgattcacgacaattcctcgcctaacagagcatctatccttgctgacaaggatgaggcagacaaccaagtggaaacgctctcggcgaagatctccaggctagacaagaaatatatccaaagccaggaacgcttgacaacgacacgctctgaaattggtgtcatcaacagtaaatacaagcaggatgagacctcctccgagggagaggcagaatccaagagtgagatgcactcatttttggatggtcttgcatctcgttctgttcaaaagcatgtgcaacggacaatggaaactaagacggctcttatccgtaatatcaatcgtacaaatcgtgcgttgagagacgatcaaaaaaagttgctacccaaagaagagcgcgaagaaatggacgctgccttcaaagaaaatcttgccaaatatatcaacgttttgaaagcgcaaggggtaaatctatcgcccattgagtcatcgctagattacaaaaaactttatggaagtggcggagctgctgaaagcacacgaggcatattggcttattacatggcagttcttcaccaaattcacaccgcaaagaacgaagttttttcagccgtgataattgatacgccaaatcagcaggaacaagcagactttaactatgaaaaaattcttcaattcctcatgaatacaataccttctgacgctcagcttattttgtgtgcgatgaatcgaaaggaaattggggcttacaaacagtcagcatacgtaattgcattggatgacgacaagattttgagtcgaacgaaatacaacgagttcaggacaatgctcaattttgatgactcaatctga

SEQ ID NO: 93350 - DNA, 1077 bp, Vibrio coralliilyticus
atggcagataatccactcgcagaagctcagcgtgaatccgctggagcgagcacatttggtaagtataacttccagtttcactgggctttgtgtgaaattattgaaaaacataaacagcaaaaggaatatgcgttacttatagagcatcatgaagatgtagttattgctgaaggcttgaacgcttcaagtgcgacttttgagttctatcaggttaaaaacaaatctgccaaatttacaccagcaaacttaactaagcgggaaaaaggcagtaacgagaaactaaaaagttctgtacttggaaaattactagaatcctgtataaatacacagtgtgaggataaaattaccaaaattggtttagtttcttctagtggtttttcgcttaagaccgatggagatttgaaactagatgttatcaaggtcggtgacatcactgaagatgatcttacaacactaaccgacaacatccgtagtgaactaggaattacagttctgcctgagaatttacagtttatcgttccaaatatacagcttaaaaatcaagaagattacgttctgtcgcactttgcgcgtttagtagacaagctgtttcccggagctttatgtaatccagtaaatatctatcgttcagttattgatgaaatgggacgaattggtcgtattgaatatgactacaaagaatggacccggcttctagaaaacaagtcgctaacttcaactcaagtacatgacgtgattatccaacatacaaaacacccttgcgtagatgacttgaaaaatgacttcgatgacttagcaagtgaccttgggtggaaggcaaaacaaaagagaggcttcaagagtaagctagctttgatcgctttgagtagagctggctttatgacctctttagacattgagctcactaacttgttccaagcttcgcacgacaaaattgacgaagaaaattactcggatgatacaacataccttgaagcactgcgtagccaagcaattgcagatggcctactagctcgagttaataatgaggatgagctgttactagagatcatctactgcttattaaaggctcaatga

SEQ ID NO: 93351 - DNA, 1710 bp, Vibrio coralliilyticus
atgaaaggcttacaatttcaacgtctagttctactgtccgattcgaaaagaacggcgaatcagttcaactttccgaagagattaaatctcgttacaggaaacgacaatagtattggtaagtccactttagtaaaaagcttattttgggctgtcggttgcgatcctcattttgacccgcattggaaatctaatgatgtaaaagcaattctgtacttcacagtaaatcagaacaaatacatcattagccgttatgctgatggtatttactttggcttagagggctcaccattaactaaatactcaaaagtaaccggtaaattcgctgaagattttgctgaagttgtaggctttgatttaatgctggccaatagaacagaaggcattgactgccctcctcccgctttctatttcctaccattttatatagatcagaaaaagagctgggatgagccatggaatggttttgaaggacttgggcaatatgcacgatttaagcagaatctgataaaatatttcggtggctacttacctaaagagcactttgatcttgaagaagaaatcttcgagcagaaagcaattgaaaaagaagctaatcaacaagttgttcggataacagaagcaatagaccttctcaaagaaatcgctccagatcaaaccgtagcaattacttcggaagagtttcaaagcattcaacgtgagatagaagaagaattagctagtttctcatctagccagtcaaacctctacgagctgcaatctattttagcgaatgagattcatgaactagaacaacagcacttaatcgctagtacctcagctaaagaattagatgacgactatacattcgctgtcgaaaacataccatcagactctcttgagtgtcctctatgcggcatagaacatgataattctctgctaagtcgtgcagggcttttagctgataaagaaagtattgaacagcaagcagataaaataaaatctctactcgaaactaagtatcaggagcgcgaagctctcaaccaagagatcagttttgttaccgctgagattgaacgtatcaatgaaaaatacttaaaggaagactctgaggagcaacaagagaagtttgagcaagctatccatgccgtatcacagcataaggttaatcaaaatgtaacgcacaaaaaagaaagctgccagcttcaatcaaaacaagccaatgaacaacaaaaggaaattaagaaggaacaaagaaagttggtcaaaaaagctactcgtgatgaactaaatgagctttttataggcaacctagttgaatctatcaattccttgtctgccactggtgtaaacctcgatggcgtaaaagcgccaatggattacaaaaagattctaggtggtggtgctgctgaggggacacgcggaacacttgcctatcaactagctgttcttcgccaaattgatcatgcaaacccatgtgagatagccccttttgttattgatacaccaaatcaacaagagcaggctaagcatagatatgaacaagtaatggacgtcgtaacagaaaacatccctaaaggctatcaagtaattctgtgcgctatggataacgaagctctgtcaacatataagcaagatgctcatgtcatcgaacttgatggcaatcgtctacttcaacccgagccatatgacgcgcttcgtgcagagtacgaacaagttatactaaatagctaa

SEQ ID NO: 93352 - DNA, 1077 bp, Vibrio coralliilyticus; identical to SEQ ID NO: 93350

SEQ ID NO: 93353 - DNA, 1710 bp, Vibrio coralliilyticus; identical to SEQ ID NO: 93351

SEQ ID NO: 93354 - DNA, 990 bp, Novosphingobium pentaromativorans US6-1
atgtggggattggcgctgctgttccagcagcatgggaccaatgacgactatgcgatcgtcttcgagtttcacgacgatattgcattgctcgatagcgcaagcaatcccacaaatgttcgtttctaccaagtcaaatccaaggccaccaacggcggttggactcttactgcgcttcttaaacgggagaagttgaagaccaaaggaggcactaaggaaaagccttcgttcatcgacaagatgttcgataatgtcgataagtttccggacgcggtcctttctgccgatttcgtttcaaaccagctttgcggattcaacgccggcaaaacttcctttcgcctgaacgaatgcgagcctagccatttcaagaagatcgtcgcatcgatccaggaggcttacccgagagctaccgaggcccaggtcgggctgctcggatttcaacgtaccgatctcagccttggagacgtggtctcccacacaaagggtaagctgcagaccttcatcgcggagcagctcggttcggtttggttcagtcccgaggccgtttaccaagcgatcgccgatgaatgccgcaggaaagcaaatttctctggtgacactacttccctccagctggctatcaaggaaaaggggctgaccaaggacaatgttcaggaatggctggatgccatccagagcaacagccgatctccggattggggaacgatcgcgccgagcctcacctatcccttcacggaccagcttcgcatcagccaggaatatgcggtttatcgtgctgccgcgctgaactcggccgacggcgctgtccagcgcatccgcatgaagatcgcagaagcactgccgaccgtcatagatgacgcaacgcttagtctcgtcgacatggtcgagacgctttaccttcatgcagaagagatcgggaagaagtacctttcaccatttagtccctcaagactgaaggcgatgataatatatgaaatatacacgcatcattaa

SEQ ID NO: 93355 - DNA, 1623 bp, Novosphingobium pentaromativorans US6-1
gtggtgttcggcgagaacgacaccgggaaatcgcatctcatcaagtccatctatggcgcattcggggcagatgcctcggtcgtgaacgagaaatggatcaaggcatctgtcgccacgatgctcgaattctccgtggatggtgcaatctactcgatcattcggttcgataatcagttcgctttgttcgatgctgcagatgatctgatctggacgggaacgtcgctaatgaaggaggtcggtccgaagattgccgaactgctcgacttcaccattcagttgaccaccaagtccaacgatcttgtggttccgccgccgcaattctgcttccttccattttatcaggaccaggaccggggctgggatgacagctggagctcgttcaagagcctcgccatgattcccaatttcaagaagagcatcctcgaatatcacaccgggattcgtccaagggaatattacagcgcccaggcgcagcgggcggatgcgcagcgagagcagaacgagctcaaggccgagcggcgcgcactagaccgggcgaccgtgcgactgcgaaacgggcgttcgccggtgacaacaaccttctcgccggagttgtttgggagccagatcgaacaattgctggcggagctgaatgagcttcgcaccatctatgagggcgtgaagcacaaaatatccgaactccaatctcggcgggctgtacttgtggaggaaattgagatcgctcgcactgctttggcggagctcgatgcggatgtgaaattcacccagaacttgtcggatgcacaagtcatatgccctacttgcaataccgtgcacgaaaacgatttcgcgaaccgcttcaacctcatcagtgacgcggatgcgtgcagggggttccttgcaagcgcgcggcactcattggtcgaagttgaggccgatatcgcgcgccagatgcaatcgctgcattcgtatgacgaccggataaagcgaatcgacgcgctactggaagagaggcgtggcgaagtaaagctccgcgacatgctcaaggatgagagcgaacgcgtcgtcgacgccacgatcgcggcagagcgtgccgtgatcgacgaaggcataatcaaatggcaggctagggaggatgaggccctaaaaacgatgaaggcgcatagcagcgccaaacgcaaggctgagatcgttgccttctacaccaagaagctcagtgctttcgctgtagagctcggcgtgacgttcggagccgctgccaagaagagtgtctcgcccaagataaatgagaccggcagctacggcccgagagccattctagcctatcatttcgccctgctacatacgattcgcgaattcaccacctcctgtctgtgcccgattatcctagatactccgctacagcaggaccaagacgatacaaacgccgccgccataattggctttgctctcaagaacagaccgcgcgacatgcagctagtccttggcacggtctcgctacacggcgccgaatatggcgggcatgtcattaacccactggtgaaggagtcattgcttcgcagtgaggagttcgacaccgtcaacacttacatgcgaccattcatcaataagatgcttggccaagatcagggagagcttatctag

SEQ ID NO: 93356 - DNA, 990 bp, Novosphingobium pentaromativorans US6-1; identical to SEQ ID NO: 93354

SEQ ID NO: 93357 - DNA, 891 bp, Novosphingobium pentaromativorans US6-1
ttggcggagctcgatgcggatgtgaaattcacccagaacttgtcggatgcacaagtcatatgccctacttgcaataccgtgcacgaaaacgatttcgcgaaccgcttcaacctcatcagtgacgcggatgcgtgcagggggttccttgcaagcgcgcggcactcattggtcgaagttgaggccgatatcgcgcgccagatgcaatcgctgcattcgtatgacgaccggataaagcgaatcgacgcgctactggaagagaggcgtggcgaagtaaagctccgcgacatgctcaaggatgagagcgaacgcgtcgtcgacgccacgatcgcggcagagcgtgccgtgatcgacgaaggcataatcaaatggcaggctagggaggatgaggccctaaaaacgatgaaggcgcatagcagcgccaaacgcaaggctgagatcgttgccttctacaccaagaagctcagtgctttcgctgtagagctcggcgtgacgttcggagccgctgccaagaagagtgtctcgcccaagataaatgagaccggcagctacggcccgagagccattctagcctatcatttcgccctgctacatacgattcgcgaattcaccacctcctgtctgtgcccgattatcctagatactccgctacagcaggaccaagacgatacaaacgccgccgccataattggctttgctctcaagaacagaccgcgcgacatgcagctagtccttggcacggtctcgctacacggcgccgaatatggcgggcatgtcattaacccactggtgaaggagtcattgcttcgcagtgaggagttcgacaccgtcaacacttacatgcgaccattcatcaataagatgcttggccaagatcagggagagcttatctag

SEQ ID NO: 93358 - DNA, 1143 bp, Clostridium bolteae 90B7
atggctaggaagaaacgaggacctgctgagatgcctgatggagttaacgcacaagacattagagactcaaaagaaagtgttaccgtagacaccgggtctggtagtatgtcatttaaccgttttgaaatgcaaataagccaaacccttcacatggcgattgagctttatgatagtttggattatcttttaattcttgattactatgatgatattacattatttgatgacgagaaaaatccagaaattgtaagctactatcaaatgaaaactagcgaagattccattagcctgaatacggctatttccggagattggcttacgaaattatatgcacaattagaacggccagattggttcgtgaaagaactcgggcttataacaaattgtcctttgaaagtcacaacaaatgttaaaggtcacgatggaaaagaaaaaagagaaacagtaaattattcttctgaaaaaacaccgtttactcgttttaatccaattactattaatagagtaaaacaggatattgcaaaaaaacagggaatagatgtggaagaggtagacttatcaaaatttgtacatattcgtacaacactttctataccaaagcatagagaaatagttgaacaggaaatgggggacttcttaaataaaaaatatccgcgtattacgcttgattcggtaaaaacaatttttagtgctatgctcgaagttttaactaaaagacaacaatatgagctattatcaaaggatacgcctcataatgaagtgcgtgtaaaaaagggaattgcaaaaagtgattttattcggattatagaagaagccatgctcatctctattcctacctttgaggaaatatataaggtggctggtttcaaagaggatgagaaatataaggcgtcatatgaatatacaagtattttaggtgattcacaaacaaaaccagatgaattttctagtatatttgtgcaggtaagaaaactgtgtgcgaatgaaaggaaaaatacaggagagtcaatttgggagtatgcaaatagactgtgtgatgaattatataaaggcaatttcattttggaagcattatacaatcgtatgtatatatgtattttgatcgtatgtattcttattaatgaggggaggagagcagtatga

SEQ ID NO: 93359 - DNA, 1692 bp, Clostridium bolteae 90B7
atgaatgaaatgtattttaaaagtgtactaatagcagatataggaaaacatacagctcgatttcaaccattttcaaaaggatttaatgtagtaactagtcaggacaatcatgtggggaaatcttcattactgaaatcattatattatacaatgggagctgaggtttcttatgatccggtatgggataaaaataccaaattatatatagttacgatcagtgtaaatgatgaagagtatagagtggctagatttcagaaaaattatgcaatttttcataatgaagaattgatattattaactcatggtgttggatatgatttggtgaagaagctcgaagaaattttttcattttcagtttatttgccaaataaaactactaagaaaattgaaatggcaccaccggcatttacctttatgccatactatatagatcaagatacgggttggagtggattatataatagttttgcaaatatcgatcagtataggaagaatgatagaattaaatcattgtattatcatttaaatatttatacacgtaatacagttgaattattagcacgaaaagactatttaatggaagaaattcagaatttaaaggaaaaggaagaaaaactacgaataacctatgaggcacttttggatgaaacagataacctatttcctgcagatactgtagaggaattggaagaaaacatgcaaattccgaaagcgcaaatagctattttggttgatcggattggaaaaactcgaaataagatgcagtctcttgagacaacattaaggcagcatgagtaccaactagaagtaattcaagagtatcaaaaaattaagttaaaagaggctccaagagcaaatatagaaaaaaatcttcatacatgtccgcaatgcggctatacttttgacgatgaattgtataacattgttcgttcaaattacaattttcgtaatgaggattatatgtgtcagcaaattcaactaattattaaatctatttctgaggagttgcagcgccataaggatagatatgtagaattaatgaagatgctggaagaacaagaaaaagtgtatgatgagtcgcaagatgcttatgaagtatacgttcgccagcgtgggttaaaagattcattaaaacattttttaaagcagttaagtgacaacgcatctgagcagtcaggctttggaacagaaattaaaaaaatagaaaaggaacttagaaagttaccaaacaagaaagaggttgaggaaaagtatattgaatatgtgcgtttaaacattatacagctcgatgcttggaattcggcctatgaggataatataaaattactaaaacctatccaagcacaaggaacattagaaaacaaaataattttggcgcaatttgtggggttgtttcaaacgatggaatactttaaaagtcgttccatacgtttaccctttgtagtggattcgccaagagcaaaggaacccagtgttgaaagtagcaaaaatattttaaaattgatatttcaggtagatatgttaccacaagtcattcttgcaactatggattacgctgacttccaagtacaaatagaacagaaggctaatgtaattgtgctgaccgagaaacgaaaattattgaattctaaagactatcatctacataaagagcagattgaagatataattgaactactaaaaaatgcatga

SEQ ID NO: 93360 - DNA, 1143 bp, Clostridium bolteae 90A5; identical to SEQ ID NO: 93358

SEQ ID NO: 93361 - DNA, 1692 bp, Clostridium bolteae 90A5; identical to SEQ ID NO: 93359

SEQ ID NO: 93362 - DNA, 1206 bp, Rhodanobacter fulvus Jip2
atgggcgggggcaaaaggctcggccacatcgagccacgtgagcgcgtgggcagccaaactgggcgcaagtacgagtatcaatatgagcgtactgctctagccgcgctcgacattcttgtgggtaacaagaaacaagtcagcgtctactgcgactggcacgacgactatgtcgtcgaaatggacgtgcctcccacgcggtacgtatttcaccaagtgaaggggcgcaagtcgtcgcaggggccttggacgttccgtgagttcttcggcgtacccctgcgcgaggaaagtactcaaacaaagaagccggctgcagttaccaaagcggcgattgtgccgttgatgcttttgcattacgggaacttcggtgacagctgcgctgggcttgcgttcgtgacgaatgcaggtcttgatccaagcttggcggcgtttctcagttctgttgggagctcaaaagatgaagccgcgctcccagatttggcgaagaatgccttcgatcacctcgcgcgtgcttacgtttccgccgaccctaagcatgcctcgtcagcaagtgaattgttccggtggcttcgtgagattgcggtgtataccgaccaaggtcagattgagggttcggacgctgcgattcttgagattgctgatgtcatcgtggactacagcgagatcgatctcaccctgcgccaatcaaaacaaattgcacgcgagatagttgggctcgtacgcgctaaggttgcgcatagtactaccgttgtgcccgcctcggacgagcaattgcaacaagagaaggggattgtcgtagatgacgtgctcggtgtgttaagcctttcggctccggcttatgaggcgttaaaggccggtgcggggagcgacaccgtgaaaacgctatcccggctacagcgattctgcacagccaaaggtctcaacgagcacttagtctctatctgctatttcaagtctaggtgggatatgtggcgaaccattgaacggcacaatcttaagagtgccgactatgtcctgttggaggctcgggcgcatgagacccttaaaggtaacctgacgatgcatcaggtaattgaaaattccaaggatattgcgaaacagttcaaggggagttctgttactcagctagaacctgagcatgtattgggactaattttttcgttggccgcacaggctgaatcgcctgccatcgtggggctcaatcggtga

SEQ ID NO: 93363 - DNA, 1803 bp, Rhodanobacter fulvus Jip2
atgagcgttaggctcgagtcattccaatacttgccgcggggcgctgatggatggggctcccgcttgctttcgttcggagcaatgtttaccgcggttcaagcgccaaacggtgccggtaagacgccgattatgaagggcgtaatgcaagggcttggccatgaggtggacttgccgcccgatgtgcttgcgcggtgcgagtttgcccaagtcgaactctcggtagacgaacgtccagtgaccttgacgcgaaggctcggcgccgagttcgaaatgcacatcgacgacggttttaatcaacaggcgttcacgaaccaggctgagtacgcacgctggttcatcggcctcttcagtgctgacctgccaaacttgacctcgaagcagtcccagccggcagaactttatgcaaccgtgctgcttcccgcactttgggtggaccaggatcacgggtggacaacggactattggacaccgcccaatcggaatttcatccgggatcaacggcaagaggttatgcgatttctcgtgggcctgccgccgcgacatcccttccgaccgaagacagacttcgaggcggcgaaaagatctctggaccgcacggagcgcgcgcttgagatgcaaaggttcgtggtcgatcggctccggactaacgagcaattgtcagacaacgaagagccagggcttatcgagcggcgtttgcagcttcgtcaagagcttgagataaacagcgaagccatcgccgccatccgttcttcgagcagcttctacaaccaagaaatagaggcgctggatactcagcgccatgagttgacggtccgcgccaactctttgaataagcagaaagggcagctcaatctcgttctctcggagcttgatggcgaggaggacattttgactgcaaatgtccaagccacggacctactccgtcagttttgtagccgagaggactgccatatgttcaagacgtcagagcggtcatttgggcggtctctcttgtttcttaaggatcaaatcaaggacctgaaagcatcggatcgagatctgagtctcgacgttgaatcggtcgaaattcagatcaagcagcttagctacgctatcgaatcgaagtgcgccgagcgagaccgcgtcgtcaacgcatctccccaaggggaggtcgtaggcaagctcaacggtcttacgaaagagttggtggacgttgagctaagaattgcgagagttcagcaatatgcggcggagcttggaaagttcgagcgtcttctcgatcagcgcgagcaagccaccgtggccgtcgccgagttgcgacccgcaggcatcaggggtgcgaccgcatcaacggatgtacggcagatgctgagcgaagcgatgcagcaatggctagttacgctaggcacccagaataccaagtcggcacatttcgatgacgacttcacgttgtttgtggatgatgcaaagttcacagcaacgacgcatcagagcggcagcacgcgcacacgtatcgttctagcctttcacgccgctcttctcgaagtttctttggctcgtggggggaaccatcctgggtggcttctattcgacgcaccgaagcagcacgagcttagtcaggtcgacttcgatgcgtacaccgacaggcttcaaatgttggccgtaaagtacccgggccgagtacaagtcgtcttttcagcggcggatctcaagacccaatttcaggtgggcgatgaagtctggcacgcgagtttcactattgacggcgagccgcgatttcttggagatgttggtgcacaggaacaactagagatcggggattag

SEQ ID NO: 93364 - DNA, 1083 bp, Comamonas aquatica DA1877
atggcctttctagacatactgaacgactcactcaccaaggagcggggtggaaggcatggcggaaagggccacgaatttcagcgctattgggcactttgtcacctcttacaagttgatcttgaaaaggacgagtatctacttcttctggaatttatcgaagatgtagccgtgatgaacagcgacatcgctcccgaccaaatggaactcttccagctaaaaaagaaggagggaagttctagcaaatggacgaagaccaccttggcaaaacctcccaaggaaggaaagtcgatacttgcgaaactccatgactcgaaatcaatcgcaaaagacgaaactgtggcgattgcttttgtgagcaatgcacccgtggagctaaagctgggcagtggggacgatccaacgggcctaactgagtttcctgcaagtcagattgatgcgggactactcactgatctcaaatcttcggtagcaaaagaactgggctgcgatgtcagcgaaattgactttggcaacttgaagttcatccggagcccgctagcaatggatgatctagaaaatcatgcaacaggtagagtttcgacctttctcgcaaccaagtttcctgactactcgcctcgtgccgacgtactctgcaaagctatttatagcgaaatcaaggtaaaggccacctcaacagaagaagccgccagctttggagacctgaaaagaatccgaggaatttcgaagcaacagttttcagcaatggttgcgctcacgctatcacggaagtctgacagcgatgtaatcgatgcatttctggccagtctagcgcacgaaggtgtctcctacgttcagcgtgaggcaataaagcgagcagcacgccagtttgtcgtggaaaaagcaggcaggggcagcagcctgctgtccctgctgcaaaaccaggttgagaaatcactccagggaattccaaataatttggttacctcttgggaagttgccaattggattgttgaacaagtgctcgctcaggaaaaaggcactgatttttcaatcctagaccgtaattacatgattgccgcgacgctcttctggatgaaccaatga

SEQ ID NO: 93365 - DNA, 837 bp, Comamonas aquatica DA1877
ttggaactaattgatgatgccgtcacactgcggaaagtgatatctgagcttgaagtagagcatcgcaaatgcgaagaacagttggcaaatatttatgggaagataaatcggattaagcggaaatccctggatatcgagaagacattgcaaaccaaaaaagggatgctccgtcttcaagacgtcgtggatagtcaaagctctgaagtaatccgaactgctttttccaaggacatcgactccttaaagcgccagttggccagtcaggaaaaaactgccgctgatgccaaattcaaggttagtcaatttgatcttcctgaaagaacaaaggccataaacgacttctactctgagcgaatggaactgtttgcaagtgagcttggggtgcatgatttgcgggatgatgtaaagaagcgtcctgacgctagcatctcagctagcggcagtgcgctgccaagatcactgctcgcctaccagtttgctgtactccacacagcaaaggagaagggagacgcaaagcactttccggtcgtcatagactctccgaatcagcaagggcaggatgctgatcaccttcgccaaatgctcagcttcatagtaaagagaaccccgtcagaccaacaactgatattggccgttgaggacatgcccagcgatttctcgtttgatggcgagctaattgaactgacaacccctttcggggtgctcgacgtcgaacaatacgaccaagcttgcgacgagttgcgagacattgttgttgctattgaagctggtctggagcaacgtctcgccagtagtcgtattggatcgtttgacgagggggctgagcccgcccaatga

SEQ ID NO: 93366 - DNA, 1173 bp, Pseudoalteromonas sp. SM9913
atgttagaaaaaaagaaaccaagggagcaaagcgggcgtcattcatttgctgcatatagagcacaggtgagatcagctgcgatggcatcactatctattctagaaaacgatggtatcgatagggtttactgtgacttgcacgatgattttgttattcgtaaaaaagatgacgatggatttagttatgttttttaccaagttaaaactaatggcaagcaaaaccacaattggactttaaatgaattatttggccttaaagccagaactaaagaccagaaaaagcagtgtacagagaaaataaaaaatagctttattggtaagctgcttttacataccgtagttttcgataattactgcaattcagttgtctttcagaccaacatcaataatggagatgacgttgaaaaagtaatagaagacattgaagcggggacttttcaaaataagttctcggaagtgttaattgataggttcaacaaatgtttcccagaagaagtctctaatgaactatccgaagatgaaatcaaattaagattatcaaagctcaagtttgaaactgatgtacagcatttaaaaagtggtgatgataatttcgaacctattgcaaagaatgcgatttacaaatttagcgaagtagatttaggccacactgaaactcgtgaaatactgatgaaactgcttgaactagtagaaaataaatcaagtggtgtaatagctgagctaactcaagaaagtattgagcaatatgcaggaatagctattgaagacttactatcgatactaagtatatcaaaggacgcatacaataacttgcttgaaagcggagatagtaaagttataaaaagcgcatcaatcattcaacgaacgctgtcctcggctggggctagcattgaggaagttgagtatatatcaagatgcaaaactaattgggatctatggcacagaaaaaaccgccatgtgcttttagagttcgacttacagtctatcaatagcatggtaagagaacttttaaatagctccattcgtagtgatggctcacttcatttagctagcctaagatctccaataaaagatttagtcagtaagcttgagtctgagggcttaatgtatgatctaaaccctgagctcattctcggaggcatatttgcggaattagttaaggggaaatcatga

SEQ ID NO: 93367 - DNA, 1776 bp, Pseudoalteromonas sp. SM9913
atgaagttaattagtatacaaattttttcaaatggtctttctggttggcaatcagatttactaaagtttggcgacaatattactcagctatttggtaagaatggttgtggtaaaactcctatagtacagtcaattgctttttgcttaggctatcctagcgtatttagaaatgatatttatgaacgatgcaatcacgctattttagaagtttcatctcctatcggaaatttgcaattaaagagaatttacagcaaaggtatagatattcaggttacagagcctaatggcgagaaacagaggttttatgatgaaaaggagtattcggcatatctgtttgaaacgctgggtctgacagtagataacctagtaaccaataataacaaaagcactagtccctatttagcatcaatgttgccaatctactacctagatcaagatgacggttataacaagttttatagcccaccaagtaactttatcaaagaccagttctcagaaatgatgagaatgatatttgatttgccagtcaaacactcattcgaccaaaagaaagaaaaatttaaggctaaagaacgtttagattatttagataagcaagtagagctgcattcacgccatgctgaaattgctaagcaggaagccgcattaatatctaaaagctcagaagaattagaagatgaaattagcacgttagaaagtgaaatagagcaactcaagagttcaggcgcaaaccatgatgactcgattaatgttttagatcgtttaatttcaaaacataaagcttcgataagagacttaacgcttgaaatcgctgaaattaataagagaacaagcggtattgcacagatagtagatgagattaacacagaagttgaaacacttaacttgaacgaagaagctaggcgagtattcctatcatttaatgaaatttgtggctctagtaattgccatttgttttcttcaagctcagatgcctacagtaaaaatttattgtatttaaaagaccaaattaaagatctcgaaagaaatgcagatatagataagattaaaatcgagcaaatcatgaaacaacgtgaaagcttagaaggtttaatccaaacgattatcgatgagagaaatcaatctttagaaaaaagtgagatatcggctctggtagatgcaatatcagcactaaaaaatcaaatatttgaactgcaaagccaaaagagtgatatcgaaaaagttgaattactggaaaataaacattttcaaactatcgctgagcgtaataaagctctagaaaagtatcagtcttttggtacggataaaaactcaataccagcattagtaaagctcaaagctgatcttcgagagttctttttaaactggctagaagtactaaataccaacaacattagccgaaatattacttttaaagacgattttactccttacctcggtacagaaactatatctcaacttaagggaagtaccagaactagagctgtattagcgtaccacgcagctttaattgagttaatggcactgcataattcgttctgttttaaattcttaattttagatacgcctaagcaacacgaaattcacaatgatgacctaaaccaatacatcaaagcacttaaagtattatgtgctcagcattctgttcaagttgttttctctactaccgagtatcattatcagggtgataatcaagacatagagtggaacccgaaataccaaggtgagaaacaattgatgtttttaaaaatgaatgataacgatcgaatcatttaa

SEQ ID NO: 93368 - DNA, 1029 bp, Pseudomonas syringae pv. maculicola
ttgcacattattataaacaattacgattactataagcatcaatccttttttctctccatagaaaaccatgatgacttcatattttttcactatgaccatgagaacatcaccacatgggccaccactttccaggcgaagaaagccagcaagtcttggactctagacaaaacaatgcatgaaataatcgacaaaataatcacccttggagccgtactaaaatctgacccgaacgtattacaccccgaatactggcacaaattaaacttcctaacgaatgccgccatatcttttaatgatggtgccaagaaagaaagaaaatcaatcctcgtcaatgaagccaacattaaactagaatataaaagcatagatgaaaaaatccaaaaaaatataaaaaaactagtgaagaacttcaacagcaaagctgacatcaactttcccgaactcgatttctttgcgctaaactatatcgacctccccaaaacttacaaggctcaaaaagaagctctaattggtcttttcgaaaacacttttggctatagcgttaaagatcataaggcggctatcgaaactcttttaagcatgttcagggatattgagctaaagttcaatcaaggaaatatcccaagtttgaccgctaaggagaagcagctatgcggcaaccatataaaaaatgcatttaatattatcactagcaaacagaaggcttacgatttttggcgagctgaaggtaaagaactttgcaagctgataaaaatttccgtttatgatcaacgcaaccacgagtttttgctgagcaactgcttcgattactttaaggatctcacgcaattcgagcaccaaaaaatattacagttcgtatcgtcccaaacgcttgatacacacaaatacttcgacgaattaagttatatcgagcatcttttcaaaaaattcaaagcaagccacagcaaccagcttacggaaaccgaagtaaaatttgcaataattgccgcatacgtcgaaacgagagagccaaatgaaaacgacatttaa

SEQ ID NO: 93369 - DNA, 1758 bp, Pseudomonas syringae pv. maculicola
ttgccgcatacgtcgaaacgagagagccaaatgaaaacgacatttaaatttgatagcttctttggctactccgagactaacaataaatattttcacaccatcttccaccctcacataaatataattcaaggtccaaacacatctggaaaaagtacattcttccagctgctgctatttacttttggcattaacgacaacaacgagcaactttcggacatattgaaagaagacgctttttttagattagactgcacaataagtcacgaccaaaaatctgagaaaattacttttatacgtgacggcgacaccctagtaattaagccagactcaaagccattactacggtttcatggtataagcgcaaaccactctgctgagcatatcaagctaaaggctattctacatgagatttttggctttgatctgtatctagaaagcaagggagaatacaaagcagctcctattgaagcaatttttcttccctactacgtcgcacagtccgtgggatgggtatatctccgaaaatctttttccgccttagattattatcgaaacctaaaagaggattacctagattactacctaggaataactagtcacggcgaccgcgtagcaaaacagactcttgagtcagagaaaatgtcaataattcagaaaattacatttttaagaagtctagaaaacaacgatattgatattcagatcacgaaacttactgacgagtcttttttggaagaatcaaagaattacatcagtaattatgtcgaaaggcaatcctccctagccatgaatgagaaaaattacatttctcactgcaacactctttcacagttatctgcgcggaagtccgtactagcaaaagtcagaagaaacagtgagaaacaatccccggcactcgacacttgccctacttgctcgcagagacttccagcttcattagaggatgtatatagccaccagcaagccgttaacgacactatcattgagcaagttaaggtaaaagagaatcttaaggaaatccagggcaaaatcaactccctaaaaaaaattatttcaacggcaaaagatcgcttatcatttgaatacgagattttaaaaaaagtttcagcacaaaatataaactttgaaacttggattcagcataaggctactgccagattaactaccgaaataaaaaccaagactatagcattaaccgaacgtctaaccgtgatcaacagtgcgttggccggatataatacagatgaaagcatcatcgcagagagagcaaacaaggaaaatcaattcagaagaatatttgttaaatatctcgatgaattaaatgttttgatacctacagacaaacgctacttggacctttacaaaatatcagcattcccaacccaaggtgtagagttacataaaaccgtcatggcatatcatcttgctataaataaaatctttgaaagtaataaaacaactcatagactcccccttatactcgacgccatattcaaagaagatatcgaccctataaataaaaataacatcgtacagtttctttcaaaaaacaggcctaaagacactcaattattcatatcaatggcccaacttaacaacttaaatacaccgtcctctacaggacaagacttctcaaacgcaaactcaaagaaaattatgattggagatgacgccactaaacgttcactatttaaaaaatatacaggcgaactaaaaaaccaccttgacgaaacttttagcttgctgaatttcacatag

SEQ ID NO: 93370 - DNA, 1170 bp, Pseudomonas syringae pv. coriandricola; identical to SEQ ID NO: 92376

SEQ ID NO: 93371 - DNA, 1770 bp, Pseudomonas syringae pv. coriandricola; identical to SEQ ID NO: 92377

SEQ ID NO: 93372 - DNA, 1173 bp, Pseudoalteromonas marina DSM 17587
atgttagaaaaaaagaaaccaagggagcaaagcgggcgtcattcatttgctgcatatagagcacaggtgaggtcagctgcgatggcatcactatctattctagaaaacgatggtatcgatagagtttactgtgacttgcacgatgattttgttattcgtaaaaaagatgacgatggatttagttatgttttttaccaagttaaaaccaatggcaagcaaaaccacaattggactttaaatgaattatttggccttaaagccaaaactaaagaccagaaaaagcagtgtacagagaaaataaaaaatagctttattggtaagctgctcttacatactgtagttttcgataattactgcaattcagttgtctttcaaaccaacatcaataatggtgatgacgttgaaaaagtaatagaagacattgaagcaggggcttttcaaaataagttctcggaagtgttaattgataggttcaataaatgtttcccagaagaagtctctaatgaactatccgaagatgaaatcaaattaagattatcaaagctcaagtttgaaactgatgtacagtatttaaaaagtggtgatgataatttcgaacctattgcaaagaatgcgatttacaaatttagcgaagtagatttaggacacactgaaactcgtgaaatactgatgaaactgcttgaactagtagaaaataaatcaagtggggtaatagctgagctaactcaagaaagtattgagcaatatgcaggaatagctattgaagacttactatcgatactaagtatatcaaaggacgcatataataacttgcttgaaagcggagatagtaaagttataaaaagcgcatcaattattcaacgaacgctttcctcggctggtgctagcattgaggaggttgagtatatatcaagatgcaaaactaattgggatctttggcacaggaaaaatcgccatgtgctttttgagttcgacttacggtccatcaatagcatggtaagagagcttttaaatagctccattcgtagtgatggctcacttcatttagctagcctgagatctccaataaaagacttagtcagtaagcttgagtctgaggacttaatgtatgatctaaaccctgagctcattctcggaggcatatttgcggaattagttaaggggaaatcatga

SEQ ID NO: 93373 - DNA, 1776 bp, Pseudoalteromonas marina DSM 17587
atgaagttaattagtatacaaattttttcaaatggtctttctggttggcaatcagatttactaaagtttggcgacaatattactcaactatttggtaagaatggttgtggtaaaactcctatagtacagtcgattgctttttgcctaggctatcctagcgtatttagaaatgatatttatgaacgatgcaatcacgctactttagaagtgtcatctcctatcggaaatttgcaattaaagagaattttcagcaaaagtacagatattcaggttacagagcctaatggcgagaagcagaggttttatgatgaaaaggagtattcggcatatttgtttgaaacgttgggtctgtcaatagataacctagtaaccaataataacaaaagcactagtccctatttagcatcaatgctgccaatctactacctagatcaagatgacggttataacaagttttatagcccaccaaataactttatcaaagatcagttctcagaaatgatgagaatgatatttgatttgccagtcaaacactcattcgaccaaaagaaagaaaaatttaaggctaaagaacgtttagattatttagataaacaagtagagcttcattcacgccaagctgaaattgctaagcaggaagccgcattaatatctaaaagctcagaagaattagaagatgaaatcagtactttagaaagtgaaatagagcaactcaagagctcaggcgcaaaccacgatgactcgattaatgttttagatcgcttaatttcaaaacataaagcctcgataagaggcttaacgcttgaaatcgctgaaattaataagagaacaagcggtattgcacagatagtacatgagattaacaccgaagttgaaacacttaacttgaacgaagaggctaggcgtgtattcctatcatttaatgagatttgtggctctagtaactgccaactgtttgcttcaagctcagatgcctacagtaaaaatttattgtatttaaaagaccaaattaaagatctcgaaagaaatgcaggtatagataagattaaaatcgagcaaatcatgaaacaacgtgaaagcttagaaggtttaatccaaacgattatcgatgagagaaatcaatctttagaaaaaagcgagatatcggctctggtagatgcaatatcagcattaaaaaatcagatttttgaactgcaaagccaaaagagtgacatcgaaaaagttgaattactggaaaataaacattttcaaactatcgctgagcgtaataaagctttagaaaagtatcagtcttttggtacggataaaaactcaataccagcattagtaaggctcaaagctgaccttcgagagttctttttaaactggctagaaatactaaataccaacaacattagccgaaatattacgtttaaagacgattttactccgtacctcggtacagaaactatatctcaacttaagggaagtaccagaactagagctgtattagcgtaccacgcagctttaattgagttaatggcgcagcataattcgttctgttttaaattcttgattttagatacacctaagcagcacgaaattcacaatgatgacctaaaccaatacatcaaagcacttaaagtattatgtgatcagcattctgttcaagttgttttctctactaccgagtatcattatcaaggtgataatcaagatatagagtggaacccgaaataccaaggtgagaaacaattgatgttcttaaaaatgaatgatcaagatcgaatcatttaa

SEQ ID NO: 93374 - DNA, 1077 bp, Pseudoalteromonas sp. Bsw20308
atgactgacaatgtccttgcagaaccccaaagagaaaatgccggtgctagcacttttggaaaatacacttttcagtatcactgggcgttgtgtaagataattgaaaagcacagtaataagcaagaatatgcattactagttgaatatcatgaagatgttgtaatttctgatagcttggaccccaagcatgcaaaatttgacttctatcaagtaaaaaaccagcagaaggtatttactgctgcctcactaacaaaaagagttaaatctaaacctgatcaaccagctaaaaattctgtgctgggtaagctattgagttcgtgttcaaataagcagtatgaagatcgggtttccactattggtttggtttcatctaatggtttttcacttccaacaactaataatttaaacctagatattatcaaaacaggtgacctaaaagaagatactgttgctgagttgactgcgtctattaaagctgagctaggtattcaggtactacctgaacaccttcaatttattattcctgaaatacaacttcaaaaccaagagaattttattttaggggaatttgcaaaactgattaataccttgctccctggagcccagacaaatgttgtttctatatatagagccatagctgatgatatgggacgaaaaattaggcttgagtttgattataatgattgggaaaggttgatagaaaaaaaatctttaacttccgaggaagtaagccaaactattactatccatactagtcatccttcggtaaaccaaatcaaagaagattttaatgaagttagtaaagtattttcattgagacatcggcaaataagaaacttaagagataagttaagtttactcgcgctcaagcgggtgggttttataagctcacttgataatcacttattaaaccagtttaaacgttctggagctaaagtagatgaaacaaaatatgagtctgacaaagatttaatatatgccttactagagcaagcaaaacatgatggtctgaggtcaaaagtcttaaatgatgatgacttaatggctgaggtcctttatcaatttttgacgaattaa

SEQ ID NO: 93375 - DNA, 1728 bp, Pseudoalteromonas sp. Bsw20308
atgagcgccttgatatttcaacggttagtgctgatatccgattcgaaaaaacaagcgaatcagttcgagtttctaaagagagtgaatctcgttacaggaaacgataatagtatagggaagtcgactcttgtaaaaagtttactctggtctatggggtgtgagccacaattcgatgaggagtggaaatctaatgatgttaaaacaattacttactttacggttaatggagtaaagtacataattagtagatataaaaatacaattttgttaggaaaaaaattaggtaagcttcgtaaatttacttctatttcaggagagtttgcggaagagtttgccagcattgttagcttcaactgtaagcttgaaaatagacaggaagagcttgaacagctcccccccacatattactttttgcctttttatattgatcagttaaaaagttggtctgaaccttggaattcatttgaaagacttcaacagttcacaaactttaagccacctctaataaagtacttttgcggatatttaaaacctgaatattttgaggttcaagagcaaataagcgaagagaagtcagttcaaaaagaagttaaaaaaagcattgaacgtataaccaatgctaaagaagttttagctgagacaagtgaaagtacagttatagctttaagtaaagatgaactagaaaaaattcaaattgaaatagaaattgagctaaatagtcactcagaactccagactcaaatttttgagaagcaaactgttttacgttctgaaatatatgatttagaacaacagctaaaattatcaatattagctgctaatgcattagagaaagattatgtatttgcagtcgaaaatgtggccgaggatgctttagaatgccccctatgtggagttgagcatgataattcactcataaatagagctggtttacttaaggataaagagtcattagaggttcaatctgaagtaattcaaaaagagttacatattaaaaaggttgagcttgatgatttagggttacagcttaactttgtcgagtctgagatagatcgaattaataaaaaataccttatcgatgagcaagagaatgagtctgatacaaagttcaatcaagctttaagttctcttgcccataaaaatattgatactcaaattaacatgtctctccagtctaaagaattggcggttgccagctcagagtccatagaaaaagaccttaaaaagcaaagagataaactattgactaagcttgagcgagaagagttaaacgaaatgtttatgggtaacttacttgaaaacattcaaacccttggagctgaaggtataaatctgagtaaggttaaatctcctactgactataaaaagcttctaggtggaggagctgcagagggaacaaggggactacttgcatatcagttagcagttttaaaacaaatagccgacgttgatcaatgtagcattgctccatttatcattgatacaccaaatcaacacgagcaggctggtcataggtatgagaatatcttaaaggtaataaagttattcattcctcaaagttttcaaataattttatgtggtatggagcatagtgctcttgattcaataagaggagaggcccatgaaattaaactcaacggttcaaggcttttagataaattacattataaggaattaaaacatgaatatgattcacttgatattagtttgcccttaagtgaaagctaa

SEQ ID NO: 93376 - DNA, 1086 bp, Polaromonas sp. JS666
atgccatttcatgaaaatctaaatgattcgctcacaaaggagcgcggtgggcggcatggcggcaaaggccatgagtttcagcgctactgggcactttgccatttactcaagcttgacctcgaacaagatgactacctcctgctcattgagttcatcgaagatgttgcggtgctcaatgctgccagcacacctacggaactcgaccttttccagatcaagaagaaggaaggtgctaccggcgtcaagtggacgaagacaaccttgtcaaagccccccaaagacgggatgtccattcttgcgaagctttatgaatctaaacgcatatcgcccgattcgagcgcgtcaattgctttcgtgagcaatgcgccggttgacttgactctgcatgacgggaaggcatccaccgatcatgaacagttcagtgccagcgaaatagaaaaggacttgaaagagtcactgcagaagtcgattgctggcgaactcagttgcactgagcaggaaattgaatttgggtcactgacgttcatcaaaagccctctggctatggatgatttggaaaatcacgccattgggaaagtatcgtcatatttgggacagaagttcccaacgcacagcgctcgggctgatgtattttgtaaggccctctacggcgaactgaagattcgggctacctcaacgcaggacgcagtcacttttgaagaactctgcaagatcaggggtatcgcaaagagtcagttcaatgaaatgttggcaaccacgctggcgcgaaagccggatagcgaaatcattgaatccgccatcgctgcgctagttcaagaaaacgttccgttcgttgaccgcaacaaagtgaaagatgaagcccgccgctacctgattgacaaagctggtaggggtggagcggttgtggcagcgcttgagcagtctattgatcgactcgttccagtgataccgagcaaccttgtacggtcttgggatgtcgcaaattggatcgagggcgaaatagcaacatctgcgcaagcctcaactttcaccatgctcgataagcactacttgcttgcagcgatcctgtacagggtcaatcaatga

SEQ ID NO: 93377 - DNA, 1749 bp, Polaromonas sp. JS666
atgaaaagtttgcgattcaaaaagctctggctagtatcagaagcatcgagagcagcgcgcagcgtcgaattcaacccgaagatgaccttgctggtgggcaagaatcacacggggaaatcgacgctggtcaagcacatattcaagacgctggggtgcgagaccaagggtaagactgatcgctgggacaacctggcgatatccgttcttcgcttcgatctggatggggtcgattacctagcgtatcggcgcgccaatgtatttgccttgaggaatgaatcaacgggcaccatgaaggtcacaacaaaatccagcgaatggtcggagatacttgcgcatctgttcgactttcggttgatgctgccaacgcaccaggaaacgttggcacaggccacgcctccatttctttttttgccgttctatttcgatcaggatggtagctggcagaagcagtggaactcctttgacaagctcactcagttttctacgtggcagaagccgcttacttcttacgtgaccgggcaacgaccaaacggctactaccttgccaagtttgaagaaacaaaggctaaggctgaaattggtaaggtgtcccatgaactaggcgttgtgcaagccgcacttgttcgggtaaaaaaagcattgccacgagtaaccgtgcgcatggatactggtgcattcaagcaggagattgccgacctattgcgcaattcaacccaactgaaacaagagcaagagtcactgcgaagcaaggcttttgagttggcctccgtcaaggaatccttgagtacgcaaatagcgatggctaaggatgccttgcgtgaccttgaaggtgacttgaagtacctcaccgaaagcaaagttgatccaacattgctgtgccctacctgcggtactacccatgaaaatggattccccatccgtctagagcttgtagatgacgcggtgactctcaggaaaattgccgccgagctggagtcggaaaggcagaaggttgatgaatccctcgccgggattcaggggaagctaaatagggtgaagcttaagtcgttggagatagaaaagactttgcaggtgaaaaaaggcgcattgcgcctgcaggatgtggtggacagtcaaagctcggaagtcgttcgtggtgcatttacaaaggatatggactccctcaaaaagcaacttgcaaagcacgaggaattatctgcagacctgaaggacaaggccgccaaatttgacgtgcctgaacgaacaaaagaaatcaatgccttctatgccgaacgctttgaactcttcgccagcgagctgggcgttcaagacttacgtgacgacgttaagaagaagcctgatgcaggcatcactgccagtggaagcgccttgcctagatcattattggcgtatcagttcgctgtactgcacacggcgaaggaaaagggcgatgcaaagatttttcctgtagttgttgattcgcccaatcagcaaggtcaggacgcggaacatctttcgcagatgttgaatttcattgtcaagcggacacctgccggtcagcaattgatcctggccgtcgaagaacgtccacaggggttgccgttcgatggcactgtcattgaacttactacgccatatggattacttgacgcaacgctatatgacgagatatctgatgagttgcagaatctggttgacgccgtagccgaaggcgtcaatgttcgattggcaaatcaacgcattgaagttttgcaagacacttcggaatag

SEQ ID NO: 93378 - DNA, 1089 bp, Marinomonas sp. MED121
atgggtttagctgaagctttgattagtattccccagtctgaaagaggtggtgagattgcacaacgagggtttgattatcaaacttgttgggcgttatctcaaatgctggaatatgaactggatggtaagaattatgtgtttatctttgaatatcatgatgatgttcttattctagatgatgaagctattccccaaaaacttacttttgcacagataaaaactagagagtcacattggactgcatcctctcttagtagcagtactaaagcaaagcctgtctcgatcgttggcaagctatttattcatcaaaggaacttctctgattattcacctgagcttatgttcgtaacaaatgcttcatttaatttgtgtgagcaaaatggaggaaagtcttcatttaatgcgaatgaaataaaggatgagtatcagattagttttaagcaagcgttgagagatcaagtaaagcttgatgatgctcgtattgatctttctgtgatgaattttgttcaatcctcactaagcttagaggatcatattacgcacttaaaaggtaagttatgtgattttctgagtaagaaatttggcgatagctctagcttgagtattaatgtattagtttcattacttgagcgagagtgtcgagaaaaatctaaggtaaagtcagcagatattattgattttacggacctgatttctcgaaaaggtttctcatccttagcatttaatggtgttcttgattcgttgaatgccagtaacagtatgaggcctgattgggaaatggctaaagctttattcagtgatcttggtaaaacatctattcagcttatccctttaaaagcagcgtttttacaagtctgtattgaccttaatcgaaatacaaagaacccatcgattgtatatcttgagtatgcagtgagtctctatgacgaggtaaagcttagctcggatttaaaattatatgtagctgaaatcatgcaaaaaattgatgaacttagtccggattatacattggctctaaagttaggaaagaaagaatgtatcgttgtttactcaataattaagacgttattagaaggaggtgagatatga

SEQ ID NO: 93379 - DNA, 1650 bp, Marinomonas sp. MED121
atgaaaaggatttactttaaaagtgttcatatattgtcacttcgcgataagaaagggttctttttcgagttctcatcaggcataaatataattacaggtgaaaacgatactggtaagtctagttttattaagagtctttatcacacattaggggcggatgtgcgtttggacaaaaaatggaaggatgataactttatttcaaaagtgattatttgtgttaataaacgtgattatgcttttattcgccatgaaaaacgtatttctattttcgatataacagaaaaacaaaagctcttagttagttctatttcacgaacagatatttctataactataagagatatttttgatttcaatttagagcttgttactaagagtaacttgtctcaagggcaagcacagccagcaagcctttttcttcctttctatattgatcaggatagtggctggggaaagattctagattcattcagcagtttagcaatgtacaaagattggcagaaaaatatcttaaacttccatgcaggtgtaaagccaaaggaatattataaacttcaaggaaagatcaatttacttgatatcgacctagaagaaattagaaacactttaaaagctctagaagcagccaagaagcgttttgaagaatcatttggaagagtactttttgatgtcgatgttgaatattatgaagagcttttagagcgtttccttcgaaagtgtcaagacttacatcaagaagaaacagaatacagagttaggctaattgaagctttatctctacgtgatgaattagtaacagagatagaagaatcaaaaagacagcttgaagaaaatagcatcgatactttatcttcctcgggagatttagatgccaaatatgcggtgcttgagaatagagataagttattgcaaataatccctgaaatgtatgaacaaaagtcagtatatgacgagagtattaccggcatcaaagatgatttgaaaaatgctcaaaggttaagttctgagcttaaaggtatgcttcaggaagtcaaagagcaactgactcttcaagatgttattaaatctcaagcaagtaaacaagttgagctcacttttgatgagcagattaatgaactacttcaagaaataggtaagttagatgttgctagaaccaagctagcggaagaaattgcagagtttgataataaaaagcgaaccaagcaaattaatgaaaaattcaaagagtcgttgaagttagcgcaaactgagttaggtattaaagaccccaaagttggtactattcttcaatatggtcctatctctaagagtgaaacaggtagtcgtgctccaagagctatattggcttatcactatgctcttcttaagacgatagaggataagtcgacaaatccaatgcttcctgtggtaattgattcaccgaaacagcaagaccctgatccaaatacagcaaaaaaaattctcgacttatgtattgacggtctttcaaataataaccaactcattatcggttcagctgcatttttgagaactactgatgaacttaaaatactgactatgactgaaaaatatagtttgttaaaagagggtctttatgaggaagtttaccaacaaattatgcctttataccaacaggctgcattattttaa

SEQ ID NO: 93380 - DNA, 1077 bp, Photobacterium ganghwense
atggtcgacaacattctaaatgaaccccaaagagaaacttcaggggcagagacttttgcaaagtacgagttccagtttcattgggctctgtgcaaaattctgcaaaagcatcaaaaacaacaagactatgcgttgcttattgagtatcacgaagacgtagttatagcggattccatggatggccaaaaagcgcagtttgatttctatcaagtgaaaaataagactggcgctcgatatacagtacaaagcttaacaaaacgttcagtagcaaaagagggagaaaagaactcagtattaggaaagcttcttagttcatgcgttggtactcagtatactgacaggataactgaaataggcttagttgcctctaatggctttagcctcgatcagaaagataacgagcttaagcttgatgttataaccgtgggtgacttatctgaagcttgtacgacagaacttacaaaaaaaataacgtctgagttaggagagaaccaaattcctaacaacctgaagtttattattcctacgattcaactagagaaccaaagagagtatgtaattactaaatttgcagatcttattgattcactattccccaaaggcatgtgtaacgctgtctccatttatagagctatcattgatgagatccataggaaaggatgtgtgaaatatgatttccaagattgggagagattagtcgatgagaagtctctgacgtcatataaagtcaaagaggttatagcagtgaacactaagcacttttctacggagcggatgatcagcgatttaagtagtttaaaaggtgacctaggttggacctttcttactttcaaaggctatcggagaagaatagaaaagttattacttcagagaacggggatgctgactgcgtttgaaattaaccggatgaaaagaatagaggattgcatcgaatccatagaccctgaacaatatagctcattaaaggatggattttctgctcaagtattaaagatcaaagctgattttccagtggatgcttttaatgatgacgatgagattatgacagaagtactttatctttatctaaaggactaa

SEQ ID NO: 93381 - DNA, 1698 bp, Photobacterium ganghwense
atgaaaggcttgcaattccaacggttagttctggtatcagattcgaaaagacttgcgaatcagttcgaatttcccgaaagattgaatctaattacaggaaaagataatagtattggtaagtcaactttagtaaaaaacatcttttgggcattaggttgtgatccagcgttggacgaagagtggaaatctaatgatgtcaaagcgttactttacttcagtattgacggagatgatcactacgtagcacgttaccagaatactattgtacttgatggagtaaggtataacagtctcagtggtggttactctgaagcatttgcaaacctagttggttttaagctgaagcttcctaatcgtgatgatgaaactgaattgcaagtaccaccaccggctttttatttcctaccgttctacattgatcagttgaagagctggggtgagccgtgggcgtcatttgaaaagctaggccagtatcgtaattggaagcctaccgtcgttaagtatcactcgggctacataggtcctgagcatttcgagatagaagagtgtatttgtgagcagaaaaaaattataaatgaagccaataagcaggttcaaagaatagactctgccattgaggtcttagaagaggtttcaacagataccacagtcgcggttagtgaagaacaattcgatattattcagcaagaaatccaagaagagctgagtcagtttgttgtggaacaagtgagattgtttgaatctcaagcagatattcaaactgaactatatgatctggaaaagcaattagagctagctgtgaaatctgcaaatgaactggaagaggactatgctttcgcggtagagtttattgcagatgatgtacttgaatgtccattgtgtggaactaaccacgataattcactagctagcagagcggtactgcttgcagataaaaatgaggtgtctgaccgggcacagttaattgataatgagattttgtgtaagaagagtcagctaagtgttattaactctgacctcggaagagttaaggaagaaatagcaagaataaacaagaaatacatagtttcagaggatgaggaaaaagctgaagatgctgctttctcgagtgttttgagttgtattgctcaaaataatgtatctaaaagtgtggttcgctctaaggaagaacagcaacttatttcaacgaatgctgaacatagtcaaaaagagcttaagaaagaacagagaaaattattgccgaaggctactagagaggagttgggagaatttttcattgggaacctgatagagaacatcaaggttcttggagctgaggggctgaatttaagcaaagttaaacatccaacagattataccaagctgatggggggaggggcagcagagggaactcgaggattgcttgcataccaactagcgatcctaagacaaattgagtttgctcggaacagtgtaacctctccttttgtagtagatactcctaaccagcaagaacaggctgtgcacaggtatgagaaagtagttgaagtcattatggagaatgttcctaaaacttctcaaataattatgtgtggtatggagaactctgcattagatgtgtttgcatctgaagctcatgttatagagttagatggttaccgattgttgcgagaagagaattatgaagtgtattctgcggaggtcgctcttctaacgtga

SEQ ID NO: 93382 - DNA, 1065 bp, Shimia marina
ttgtccaaactatcaagcaaactcatctcaacccctcagctcgaagattccgggtctgacaccgccaagaggtttcagtaccaagcactgtacggcctcgccttggtgttcgaagagcacaagtcaggtaacgattatgcggttgtctttgagtttcatgacgatctcgccgtgcttgatagcagtacggtcccagagcgggtcaggtttttccaggtcaagacaaaggcttcagggcattggacactgacaccgatactaaagcaggagaaaggcaaaggtaagataagcccggaaaagctccttccctcatacatgggcaaaatgtaccagaacgttttgaattttggggatagtgttgaggctgtaagctttgtttccaatgcccaaatgaactttgggtcaaagtcctcaaatttctgtctggatagttgtactcctgaagaggttgccagagtggtaaaccagatcaaaaaggagcatccagaatgcaaagatgtgaaaacacagttggtacggtttgtttgcagcagtctgagcttggaagatcttgatgtacattcaaagggtaaattaagtgaatttgtttccgaaaacctgggtgaaatggagtattctctcgatgccctttatcgggcggtagtggatgagtgccagagaaaatccaggacaaaatgtgatcccaaatccattcccgatttattgttgaatagaggtgtgacgaaaactgacgcagaagcttggcttacacgaataaggcagaaggcgtccgctccggcttgggatgaaatttcatcggaagtttcaggcagctttttcgagaaaaacagtatgagaaaggagtgggcgagatacggaattgaggctctcaacagcaatgtggccatagatgccgttaggttggaaattcaaaatcaattgaatgataagttcgacggggagatgactctgatggaacttgtttccgagattttcccagaagtggcgccaaaggcgcgggaacacctctcacccatcagcgaccaacgtatcaaggtgatgataatatatgaagcgtgcatatga

SEQ ID NO: 93383 - DNA, 1692 bp, Shimia marina
atgaaaaaattgaaattcaaaaaactctggctgctatcaacaaaagagcgcaaagcaaggaaaattgatctggatgacaatgtcacagccgttgtcgcagacaatgaatatggcaagtcaagcttagtcaaatcactttatgccaccctgggtgcggatccgcagaagacacctgagtcttggacagcagcaaacgtttccagcttgttgaacttttcgatcgatcaggatgagttttatatgctgcgcttcgggccagtgtttgccttgttcaatgatcgtaaagaacccttgtgggcggtaaatggcatcacgaaagggctcgctcctaaactgtcaaagatggttgattttcaagtcgagctgacaactaaacagggaggggttgcgtcgcccattcccgcattgtgttttatgcctttttatatcgaccaagatcgcggatggaccgaaagttgggagtcattttctggtacgggtttcattaaagggtacaaggacattgtcgcaaatttccatacaggaatgcggccgaaagaatattaccaggcgaaatcgcagaaggatgaggccgccgcaaaactcactggtttgcgcaaggaaagagatgccctgaatcgagcccgcgagcgtgttagtgcaaaacgttcttctgttggcattgcttttgaaccggaagttttcgctgatcgtatccaggacttgttgaaagagcagaacgcccttcagtccagctacgatgagataaaaactaaggtcgctgaacttcaatcgtctcgatccattgccctggaagagatgcagattgctaagaggattctttctgaacttgaggaggatataaaattcctaaagaaggaagacgaatctgaaataatttgccccacctgcaatactgttcaccttaacgatttttcaaatcggtatggtttgatgaacgacgcggatgcttgccgagagatctatgtcacaagtgttgcaaatgccgaaaaactaagttctgatatcaaaaacgctatggttcctaccataaggctcaatgagcggatagcaaaaatcacctcgatacttgaaactgtgagaggtgaaatgaagctgcgcgatatgctcaaggatgagagcgagcgcatggtggatgcagtttttctggatgaatccaaagagcttgatgaagaagtcggaaaagctgatcagagtatcgcctcggcaaacgccgagatgaaaaaatacgatgatcgcaagcataaaaaggagataaccgactactacgtcaagaagatggttgaattttgtaaggagctcgatatcgtcaatgttccaagctctgtttacaaaaagatccggccaaccatcagtgaagcgggcagttcccagccgcgccttttcctagcatacaattacgcgatcctgcacacgattgcgaagttttcaacggggtgtttcgcaccaatcgttatagatacacccaagcagcaagatccggacagcgcacgtgctaagtctgctatcgagttctgcatcaagcataagccaaaaggagcgcaactgatcattgcgtctggaagtatgcatgctgtggagtttgcagggcggacgattgagccacaaaagaagcactcagtgctggaggagacccagttttcaagtgtgcacgaattcatggatccattcattaagtctgcaatggactga

SEQ ID NO: 93384 - DNA, 1071 bp, Stenotrophomonas ginsengisoli
ttggcagaggaaggcggcgcgatctccgcagatcgcttcgattaccaaaagaactgggctttggctcggttgctgaccctgcaccaaggatcagggaactacgtgctcctttgtgagttgcacgaggacatcgctgtcctggattgtccagaccagccatcacgcgccgctttctatcagatcaagaccagcgcaacaagtgcttggacgctgaagaagctgacgaatcggaagaagggcaaaagcggcgatgctctaccttccattcttgggcgattgtgtgccaaggctgctcagctgaagcaggagcaagtcactttccagttcgtgaccaacgtgggaagcggctatggcttccctgtcaccgagaaggctactgaggagtctggtgaacgcctgtttcatgtgctgaaacaggccgaatggggagctataagtcgctgtttggcggacgaactaggggaggacttcgaagagccgctccgggagcaattaacggtttcgatttccaaaatacatctggacacgcacaacgaaaccactgtgggcttggtaactaactttcttgaccagcatgtcaaaggtgtttacataccccctaaggccttctatagaagcctatttgacgaattgcgtagacggacagtagctaaaaggccgtctggcagcatatcagacgtatgcaaggcaaagggtatcgacagggattccttcgacgcgatgctgggcaacgctcgatccgttgctcatgccgctggtgcttggagcaatgtccagtcagagctgcacaaagacaacgtgccgttccctgtccgcgccaagctaagagaagcatacccagactactattctaggatgcaggatccgctggacgctgctttccgaagagactgccaaatcctcgtcgcagcgggtgagaacgtcatggccaatagttcaacgctacttgacatggcgaacgctgccgttgcgctcgctcgaagtgactccggatacggcgttgcttcgctttccccggagcaggaactcattgtcgtaatgatgaatttctatgaaaagcactcccaataa

SEQ ID NO: 93385 - DNA, 1617 bp, Stenotrophomonas ginsengisoli
gtgacggtaatcaagggtctaaatgacgtaggaaagtcatcgctagccaagtccatctatgggacgctgggcgcagaagcggcagagatccatccggattggaaaggtgcgagcgtcatatcggcgctggagttcactgtcgatggcgattcctacgtcatgttgaaggaggggaaaaccttcacattgatcgaatcagagcgcgtcagaggttgctacaccagtgtcactgaaggtctcgcgccggctctctatgaggtgctgggtgccaagcttaggctgaaaaatcgggccgaaaaggtggtcgttccgccgccggcctacctgtttatccctttctatgtggaccaggacgctgggtggagcagtccttggacttcctttgctcgtctggaacagttcgctcgctggcgagaagacgttgttaacttccacgtgggtgtgacgggggctgagtatttcgatgccttagatctccaggcgacagcaactgctgccagagttgagccggctaagcagttggatggattgcgctcgcttcagaaacgagccaaggacacggtcgctgaagacatcgatgtagaaatcgatcccgaagtcttctccgaggagattgagcgcgtggtgggcatgctccagcagttggtggaggtccgtgaggaagagcgagcaaggctctcaggcttgacccagcgccgcttacagctggaggctcagcgggagattctcgaccgcgttcgcagggagctgcatgcggactacatgttcgctgtgaagcatgagggtgaagacctagagtgcccgacctgtggccagcttcacgagaactcgtttggtgaacggtttgcgttggcgcaagatgagagtcggacagacgatgtcttagttgaggtgatgaatgctcaggcgattgtctctggtgagatcgccatcagtcgtcagcgcctcaaagacgccaccgaggacgagcaaaggttcaatgagcttctcactcgcagacgggggcaggtcacgtttgcgcgtttacttgagcgagcagggcagaagcgattttcctctcaactggacgatcaggttgctgatcttgttcaggagatcgccactctggactatcggattaagcaagcggcggagcggctaaaaaatgcgcgctcaacggagcgaaagaaggagatcctcgagacctatgctcggttgttgactgactttgcggggaagctcagcgtcatgttccaagaagacttccttaagtcgctgatgctcaagattcaagagaccggaagtgaccggccacgcgccatcctcgcttacgtttatgcaatcctccatctcatatgggatgcggaggatgctgtgagatgtccgattgtgctggattcgccaaaacagcaggatcaggatgatatcaatcaccttaatcttcttcacttcatcagggacgaacggccgattggatctcagctcatcctgtttctggtcgacgatgcagaggtcgatttcgggtgtgaaccattggtgttggatacgaagtattcgctgctctccaccgaagaatatgagcaggcatctgaggtaattcgtggtttccaagccattcgagagatgtcggcacattga

SEQ ID NO: 93386 - DNA, 1092 bp, Chryseobacterium greenlandense
atgatagataaaacaattaattcaggaccagacgcacaaaatggattcgctttgcaaaggaatactgcaatttttttgttattagaaaactattttacaaaatttcaagctaaaagatattttgtttgccttgaacatcacgaagatttcttgttttgctatttaaatgaaaatgatgaagtatcactaattgaagcgtatcaatcaaaaaaaaaatcgcctgatatttggaagttgaataatgagctttttgagattttaacaaaattattaaatacaggaaaaggattaattcaagatagtatttctaaatctttaggatataaacatatactctacttctcttctaatcaaacaatttatttagagcataaaccaaaaaaaagtgagaatttaccaactatttccgtttctataaaagctgacaataaaaatgatgtttatcctaatttaccattagaacttaaagaaaaaataaaaactaatattttaaaaacagatttgcatagcgaattagaaaatttaagtttcatctggattccatttacaactacagaaaaagagcaagaaaatcaacttgttggcaaaattgatgaagtttttggcaacaaaatttttgataagagagctgcaattgacactttagtttatctttttagaaaaatagaaactacctataataatggtaataaagtaaagttattggataaaacaaaaagagtaggaaatttagaagttgaaaatgccttcaatattctaaccgcaaaagctaaatgctatgattattggcatagcaaagaagctgacattgcaagaacattaaaagtaagacctattgaaaaagagcagtttcaactagtttttaattcagcatttgatttattcaaaagcattaaagaacgagaacataaaaagatttacaattttgttaaagagaatatcaataatctaagttcttatacagaggaggaaaatgtaattgagctatttgaattgtttaagcattcagaaagaactaattttaatgatttgcaattaaaggcaattcttttcgcagctctttttgaagtattatacacaaaagaaaattaa

SEQ ID NO: 93387 - DNA, 1719 bp, Chryseobacterium greenlandense
atgaaatctcaaattacatataaaacattttttatttactgtgagcaaaataaaacaagttttttcacagattttagtgatggattaaatattatttatggaaaaaacacatctggaaaaagtacaattattcaagcaattcattacactttcgggataaacgatgaaaaacataagttgaacgaacttttaaatgaaaaagtaatctttcgattagattttattttaaagaaaggaatagaagaaaacgttactattattcgcgatgatgattttatttttataaaacgtgagaatcaacctttagaaaaattttctggtataagtggtaattcatctaaagagcacattaaattaaagcgttatttgtcagagctatttaatttcaatttacatttagaaacatctggtgaatacaaattagcctcaattgaagctatgtttttaccctattatgtcgcccaagattacggttgggttttggctttaaaatcattcagaggtttagattttttcagaaatttcaaatatgattattatgattattatttagggattactaatgagtttgacagattagaaaaacaaaaacttgaaaaagaaaaaaaggatctggaaaattcaatcaaatttctaaccaatgttgaacaacaaaaagacgaattaaatctctctaaattaatagatgaatcatttatttcaaagtcaatagaatatttagattcttacaaaaaaaacaaagaagaattaatccaagcagagaaaaatcatttattaaaatgcaacgaattaactttttatgaagagcgtttgaaaattttaaacaaagtgaataagtctttaaaaagtgaaaatccattaaagaacaactgtccaacttgtaaacaagacttaccaagttctttagaaaatatttatgaatattcacaggatgtaaataacacaattgcagaaattcaaaaagtaaaagataagcttaaagaattacaaagttctataaacagcatagaggaaagtataagtaatctaaaaaatagagttgcaaaagattattcggttctaattaattacaaaattgaagactttacatttggcacttggttagaaaacaaaacaaatgtcaaactttcagaaaatatcttaacacaaataggagaaactacgattatccttaataaaaaaatagaagagttaggaaaattcaaaacagaagatgatattaaaaaagagagaaatacaagggattatcaattcaaaaaatatttcaccgagtttttagatgaattggaagtgaaaaaattcgaagatgataaatacacactgttgtactggatgggtatttttccaaaacagggtgttgaattattaaaaacgatgttggcttattattttgcatttaacaaagtaattgaagaaacagattatgttcatagatttccatttttattggatgctatttttaaagaagatatagacgaggagaacagaaaaatgattctcggatttatttatagaaataaacctaaaggtgaacaaataattttttcatttgctgagtcgacaaaaaaccataattctgcaaatgaatataatggtgaattaatgaaaaatgaggcgaagttgattttgactgatttgacaaatgagaggtctattttaaaatacttaaattctgaacaagaaaaatatctactggaaactttaaatctaatagaataa

SEQ ID NO: 93388 - DNA, 1083 bp, Acinetobacter sp. AG1
atgaatgaaaaaaatattctaaatgaaaaagaaagagaaaatagtggattagatacacaactaagattcaactatcaagctgactgggctataacctatttattagagcgattgataaatgaagaagattttgtgatatttgtagaatatcatgaggatataatttgctctaattcagctaatttaaatgaaaatattgaatttgaattttaccaaataaaaacaactgaaaaaaacttcacattagataatttatgtaacttcgaaactggaggaaactcaatcttaggtaaaatgattcttggggttgagaataaaatatttaaaaacaatgtaaaaaaattatgtttattaacaataagtgatattaacttcaaagagaaaattaaaatttctggtgaaaaaaaatttttttcaaaattagaaaaagatgaagtttctaaaattttagataatcttcaaaaagaacttaaagaagttgacccgatatatcaaaatattttatgtttccagaagtcaaatcttccatttcagtcctcacaaactacagctaaaggtaaaatattagagttcattgaagaaaaatatggtgaaataaaatctaacatccctagtatttatagagcactttgggatgatttaaaacttaagtatgagtttaaaatcccttatgaaaaatgggatgaatgtgtaaaaaaacgtggacttcaaagcgaagaagtaaaaaaaattatagccatgaatattgcaatcgacctctctgaaacttttaagaattttctagagatttatatagataaaacatctacaaatacactcttaacaccaataaagataaacttaattaatgaatatcatacttatttactagttaacagatcaccagaaattctaaattatttaaataatatcagaaaaataatatcatccaacctagatttagatgatctaaattcaattcaactagaaataaataagcttgatgttataattaaccaaagtgttcagctaaaggaatttaatcgcatgaaaattgtagcaacctatgaggtattaaataaagcctatgagcaattccaataa

SEQ ID NO: 93389 - DNA, 323 bp, Acinetobacter sp. AG1
atgaaaaatacaagcaactcttttcaatttcagagaataataatagtatctcaaaaagaaaaatcaggtcgagtcttaaaaatatatccaagaactctaataacctccaataataatactatagggaaatcgactttactaggttgcctcttttgggggttgggatgtgacataaggtttgaagaagactggccttttttagatgttacagtattaatagatttttcggtacataacaaaaattataaagtaaaaagagattcagataatatttatctttatgatgaagagaatgataaatgggaagcttatgataaaataac

SEQ ID NO: 93390 - DNA, 1092 bp, Niastella koreensis GR20-10
atgaccaaatcctctgctaccaccaatgcaggagtgcatggatcaacaggttttgaatttcagaagcactgtgctttgtggcttttatttgaaaattacacagagataagtggtaaaaagtactttatttgtattgagcatcatgatgacttcttattttgttttcttgatgacgcaggcctaattgtgaatattgaggcttttcaggcaaaaaaggcttcttcggcctggagtaatggcgttgtattatcagcgattttaaaaaaactcacccaaacggggcttgatttacttaatgacacccaccccaagcaatccaactatttacacacactcagttttgtgactaacgattcaatttcgttaaactgtgggagtagaaaaacacaggaccgcaaaacactgtctattaatgaaagcaatcatttggttacatatgatagtattgatgacgcattaaagcagaatatcctaaagggcttaagtaaagaacaagtgactgcttctaatcaaatacgggagttagacaaattatcgtttttctttatagacctgcctaaaacgaacaaggcccaaaaggatacactggctggtcaaatatcaagaacgtttggtgatagggttgccgatcctaaggctgcactagacacgttattattactttttagaaatattgaatatgtcttaaatagcggaaacactgcacgtttgatggataagacaaaacgtgttgaaggtgctgaaattgcaaaagcaatgcaaatcattaccttgaaagcaaaggcttacgagctatggcgcaaacaaggtgataatcttgctattaaattgcaaattggagtttttgaccagaaaaaatttgaatttcaatttcaaagcagctttgatttcttcaaagacttatcccaggcagaacatatcaagctgagaaattatgttcagcagaataaaaatagatgggcttcatttttgaatgatgccgaaagtatccaccatatttatgaacgcttcataaatgagaataacactctactgaacgattttgattgtaaggctgccatttgtgcggcttatgttgaacttaaaggataa

SEQ ID NO: 93391 - DNA, 1734 bp, Niastella koreensis GR20-10
atgaacacgcaccttaaataccaaagccttttagcttactccgataaactgtcaaaatgcttttttacgcattttggcgacggcgtaaatattgttcacggacgaaacacctctggaaagagtactctgtttctatctctactttatacttttggaataaatgatggaaacaattatctagctgatattctaaaagagaaaacaatatttaggcttgattgcattttaaggagagaaaacattgatgaaaagcttattataattagggatgatgacacgatttatataaaagtgggcgctggacttataaaaagatttagcggcataaatggcaatagagcggttgaacatactaaagtaaaaacatttattagtgaattatttgagtttaaccttttgctggaaagcaaaaatgaatacaaaccagcttctatagaaacaatatttctgccttattatatatctcaatctgttggatgggtttatctcagaaaatcatttagtggtctagagttctataaaaactttaaagaagattatcttgatttctatttgggtcttgagtcgtcgacagaaagggttaagcgacatgagcttgaggcaaagttgaaaaccaaattatccgaaatttcttctttggagaaattggctacaaagaatgacgatatccagcttacaaaatggagcgatgaaaagtttatagacgactcaaaaaattatattcaagactatgcaaaaaattatgacgctttaactcaagaggaaaatgagtatgtcttgaagtgtaatgaattaggatttctattagagcgcaagaaagtgcttttacgagtttctcgtaatcaaaaagaacaaaaacctgaaataggtgtttgcccgacatgtacacaatctcttccattggggatttcggaagcgtataagttttttcaagaggaaaatgacacaaatagcgaactggaaatagtcaaagaaaaaatcagagatattcaatcaaaaataaattcactacagatttcaataaaagtaaaacgagataatatctctaaagactattctacattaaataaatacgtccataacgaagttacatttgagaagtggcttaagaataaagcaaacacggaactgcttgcaaacttaagtaataaaattggcgagttaacattgaacgcctcagagataaaagaggatcttaaaaagtataagtctgatcaagagattgcaaagacgagagtggcgcaaaccaatgtgttttcgaccatttttcagcaatacttatctcaattaggcataaaaaaattgattgaagatcgccatactaaaatttatgaaattaatacatttccctcgcaaggagtagagcttcataaaacagtaatggcctaccattttgcctttaacagagtcataagcgataccgctgatatacacagattgccatttatgcttgatgccatctttaaggaagatttagatgaagaaaatcgaagtgtcattttagattttatttcaaaaaacaaaccaaaagatacacaaaccattttgtctatagcccaaactaaaaaccagaaaagtaatgcagctaaatataataaagaccacttccaaaataatgcaaagctcattcaaatcggggatggaatatcagaacgatgtttccttaacgatgatgttaagaaatatgacgacatcattaacgatacaaacgagttaatgttgagctctaattaa

SEQ ID NO: 93392 - DNA, 990 bp, Novosphingobium nitrogenifigens DSM 19370
atgtggggtctggcgctcctatttcagcagcacggcaccaatgacgactatgcgatcatctttgagtttcatgacgatgtcgcgctgctggatcacgccgtcaatccgacatcggttcgcttctatcaggtcaaatccaaagcgacaaaccacggctggacgctgacttccctgctcaagcgagagaaggtcaagaccgaagacggggtgaaggagaagccgtcgtacatcgataagatgtacgacaacgtcgacaagtttcagggcgcggtcttgtcggctgatttcgtttccaaccagctttgcgggttcaatgcggaaaaaacatcctttcgcctgaatgaatgcactgagaaagatttcaagaagatcgttgcgtcggtcaaggaaagctatcccgctgccaccgaggccttggtcggcgtgctggggtttcagcgcacagatctgagtcttagcgatgccatttctcacacaaaaggcaagctccagacctttatcgccgagcaacttggcacagtgtggttcagcccggaggcagtttaccaggcgattgtcgatgagtgtcgcagaaaagccaatttttccggtgaggttacctcactacagcaggcgatcaaggacaaggggctcaccaagaacaacgtgcaggagtggcttgatgcgatccagagcagcagccgttcccctgaatggagcacaatcgcaccaagcctgagtctgccgttttccgagcagctccgcatcaatcaggaatatggcgtttatcgcgcagccgcactcaactcggctgatcgggctgtgcaaagggttcgaatgaaaatttcagaagcgatcccttctgtcatcgatgatccaaagctcagcctcgatgagatgattgcaagcatttatgggcaagctgaggaaaccgcaaagaagtatcttaccccgtttagcgcagcgcgactaaaggcgatgattatctatgagatatacacgtattattaa

SEQ ID NO: 93393 - DNA, 756 bp, Novosphingobium nitrogenifigens DSM 19370
ttgaagttgcgaaagcttcttcttctgtcgatgatcgaggaaaaggccaggcaagagacatttaatgatcgaaccacggttgtctttggtgaaaatgacaccggaaaatctcacctgataaaatcgatctacagcgcattcggcgcgaccgcgtcggtcgtcaacgagaaatggagcaaggcgtcggttacaacgatgctagaattctcgatcgatgggacgatttattcaatccttcgcttcgatgatcagtatgctttgttcgatgctggcgatgatctggtctgggccggcgcttcccttgtaaaggacgtcgggccagagatcgccagactgctcgattttacgatcgagctcgcaacaaaatcgaacgacctggtcattccgccgccgcaattttgcttcctgccgttttatcaggatcaggatcgcggatgggatgacacgtggagttcgttcaagagcctttctatgatcccggacttcaagaggagcattctcgagtatcacacggggatccgcccgaaggagtattacagcgccaaagcgctgcgtgctgaggcccagcgcgaacaaaatgagctcaaggctgagcggcgcgccctggagcgcgctaccgcgcggctgcgcaatggtcgagcacctgtcacggtaaccttctcacctgagctcttcgagcaccaaatccagcaattgcttgccgagttgaatgagcttcgcgccatttacgatggcgtcaagactaggtcgcgttga

SEQ ID NO: 93394 - DNA, 1101 bp, Lachnospiraceae bacterium A2
atgggtaaagttcttgaattggaacagagggaacaggcaggttctagttcatataatcgttttgagtatcaagttcactggattgtgtgtcatattataggtcaacttgaaaataacgcagaatgtattgtgttttgtgagtttcatgacgatatggcagaatttataccagagaaagaagagtaccaattttatcaaattaagacgaaagaagattcttcagattggacggttgcggagttatcaaaacgagaaaaaaagaaaagtggaggatataaaaaatcctttttagggtttatatattacaattttttgaattttggagtagaatgttcacattgctatttcatttcaaataacgattatgataaagatgttcgtctttggcagtcatatattgaagatggaaaaatagttgcggtcgaaaataatgaactctatcaaaggattaaaggaagaattaaggacgaatatgtagattcattaccatctaattttgatagtgtatttgatatatttattcaaaatacttttgtacataaatctaaattacaattatcaacatatacgacgcaaacatcaggtatgttttttgaccagttagcaaataaaaatataccaacagatacggcgcatcttatttttcaacagctggtaaatgacgtgagaaaaaagagtacagaacaaataaaaacgcctattagcttcaaaagtttagtggataagaaaggaatagaaatttccaaaataaatgataaaatcaattcaacaattagcaaaaagggaaattatacagatttttataattatttatcaacgcaaggattaacggataaggaattgcattattttgaatctgcaaaaacattacatgattcaaggtggcttaatgtgaatgatattaagtaccaagaaattgtcattacattacgaaaggttatctctacatatattgaatgtatgggggatttttatgatgcaagtgttttagagaaagaatgtatgcatgagttgttaaaacaagggctttcgtcgcaatcattagatagaacattaatagaggtattgtattatgagcaaagattcagcaaagaaatttga

SEQ ID NO: 93395 - DNA, 1749 bp, Lachnospiraceae bacterium A2
atgaaaaggctgataataaaaaaactgattgtaatcagtcagagtgagtcacgttcattagaagttcctttttcgaaaggattgaatattattttaggtgggaataagactggaaaatcttcaatcattaaaagcattttttatacttttgggtgtgaacttaaaagaatagaaaaggattggaaagagcttatatcttcatatttaatcttttttcaatatgggaaaaatcaatatgtcataatacggcaaggtaaaaaatttcaaatttttgagcagtcgaaaggcgaatatttatgtataattgaatcagatgaatttcataaatatagcaattccttaatggatatttttggagttaaaatgccgtgtatttcaaaagaggggaaagagtttaatataacaccccctttactttttaggttccaatatatcgaccaggatgaagggtggaacaaaatagctgacgcttttgataaagtgggatatattaaagattggaaaaagaatacaaataaatatgtttgtggttatcttgatgataagtattattctcttcaaacccaaaaagcgcaacatataatggagaaagaggaaaagaaaaaggaattaaatcacaatcagaactttgttgaacagatttctaattctttgtcacaattggataattcaaagtctattgaggaagcaactagagaaattgagaatctagtacaacaagcagatgctttacgaaaagatattttttctataaaagcggaaatgacaatctatgaaaatgagacgtatatgaatcaacataaattgcatattgttgaacaaaatcttattgaaacagaaaaagatatagaatttgcaatgaaacaagaaaatgaattagtttgtccaacttgcggtgctgtttattctaatggattaacggagcaaatgaatataagttctgattatgctcattgtgaaaaattaaaaatggagctaacagaagcattagatgtgactgaaaatactttatctgatttggcacaaaaatatgagcagattagtaggcaattggagtcgcttgaattaaaaatacaaaaatcacaagagtttatatcatattcttcatactacaaaaataaaggtcaatatgaaatgtatgaggcgtgtgggcaacagttggacatccttgagaaaaaagtggataaaatttcatttgaaattgcaaagttagatgatgaaattaatgaaatgaaatctaaaaaaaggtcaaaagaaattaaggataagattgaaggaaattgccgtatattggcagataaaattaatgtaccaaagacattcataaaattacgagattttgtgcaagtaattgaccacactggtagtgaaacacctcgaatagtttatatgtatcaatcagcattatatttatataatcttgaaagaacagacagtccttttaacttttatataattgatactccaaatcagcagggacaggatacagataatttggaaagtatatttaagtctctgaaattaatcatgtcagacgatgggcaagttatagttggtacggaacgtgaaacgggtatagaggataaagctaataatgtgattagattaatagaaaaacgtagatgtctatcttctgaaaaatacaatgaacacattgaattgtttcaaaaattacagaaattagctttaaattgggttgcagaaaatcataagaaacaaaaagaagttgcggatgagatgattgagtaa

SEQ ID NO: 93396 - DNA, 1185 bp, Cronobacter muytjensii ATCC 51329
atggctgagttacatgaagttaaaccaagagagcaagcgggaagagacactttagaacgctataatgctcagatcagagcagcaagtattgcatgtttgtctatcctagagggtaaagatgtcaaacgcgttttttgcgaatttcacgatgattttgtcattgaaaaagtcattgctagtgatattcgttacacatttgtacaagtcaaaactaaggagaaactgcgagaaatttggaaactacgagacgtgtttgggattttaaaaaggaaaagtgcaaaaaatcctcagacagatgaaatgatcagagatagtttcgttgggaaactattgcaacatacgattaatttcggagagtcttgtaatgaaattgttttccttacaaatacgcatgttgatgaagatatagagaacattatcgatgatatcgtttctgaaaccttttctaatacacactgcaaacttataattgactcgtttaataattgcttcatctcaatccaggaagatcacgaaaagctagatattgatgcgataaaacaaaatcttaagaaactaaaatttgaaactgatgttgaatatattaaaagcaaacatgaaacgtttgaaatacttgctaaacagaagatatttaaatttagcgaaattgaactatcacacacagaagcaaaagaaatattattttctcttttggcactagtaaactcaaaatcaagtgtaaaaattaatgattgttcaagagaaaatataaaaaagctggctggtatagatatcgatgatctcctagatgttctcagcatctcaaaacgtgcttattatgactttttagataatggcgatgaacacgccctaaaatcagcgtcagtaattgaaagattgctgagaaaagcaggagccaacgacatggaagtagattttttcacaagatgtaaaataaaatgggatcagtggttaaggaataatagacatattatatctgagtttgattatatcacaatcgacagagaaattaatgcaaccttagataaactaacgtttatgcatggaaatttatttttatcaaacttaagagcattcattaatgaattatatgattcattaaatcaaaataatttacttcattccttagataaagaggctttaaccggaagtcttttttccagattagtagagcgttcaaaatga

SEQ ID NO: 93397 - DNA, 1752 bp, Cronobacter muytjensii ATCC 51329
atgaaacttgtaagtataaaaattaaaggtaggggaattgttgggcttgaatccgacgaacttgtttttggtaaaaatattactgaattttacggacctaatgggtgtggtaaaacgccactactgcaatcaatctcttattgccttggatacccatgcaaatttagagatgatatttataaattatgcaaatctgccacccttacttttacgatagctaataatatttttaaagccactagagactttgaacatactgacttcattttgtccttagaaagcaataaagagatattgaagttttacaatgaagctgattattctaagtacattttcgaaaaactatctttaaattacccatcacttcttacaactcagaacaaacagtcttatccttacttatcaactattcttcctatattttatcttgatcaagacttaggttactcaaaattttattactcgccaagaaactttattaaagatcagttttctgaaatgctcagaatagtattctctttgccagaaaaacattcttttgatgctaaaaagaaaaatattaatcttacagaagaaattaaatatttagataattcattagcagtacaaagaagaaatattgaaatagctaaagatgcccataaagataaaaacatcgaatcaatcgatagttcgattaatggtctgaaagacgaacttactgaactgaaaaatagcaaatcattaaaaaatgattctcttgtgagcatagatgcagtcataagaaatcaaaaagaaaacctaaacgctctcaagtcagaattaaaattcatggaaagaagagagtcatcattattacaaataatgaaagaaattaacactgaaataaataccctcaacctaaatgaggaagctaaaagaatatttcgctcttttgaggaaatttgcccatccctagattgtaaaatgtttacaagaagttctgaaagctatgcaaaacatcttttatatcttaaagatcaaattaaagatattgaaagaagtttaaatttagatagtgatcggcatgacgcgatagaacaggaaataaaacacacgagtaagaccatcgaagacctgaacactatgagaaccaatattattgaagaggaagatatatcttcagtaattgacgctatttctgaaataacatcaatgttatttaagctacaacttgagaaaaatgaattaaataaaatagcgttattagaggcaaagtatgttgaaatgcttaataaacgtgaacacgctttagacgaattagatggtctcgataaaaatagacagacaatccctagattggcaaaggttaagacaaccttacgagataaattcatattctggttaaaagtattgaaaacccctaacattgatttcaatattacatttgaaaatgatttcagtccaacaatgggctatgaaaccttagaacaattaaaaggcagcactaaatcacgagctatactagcttatagaagtgcattgatagaaagcatgatagaattaaattgcaagtcttttatgtttgctatatttgatactccgaagcaacatgaaatacatcacgaagacatagataattttattatggctttaaagaaattatctaaaaaacataactttcagtttatcttctcgtcaacagaatacaaatataatggtgatgatgatgatatcattttaactcctgaatatccaggggagcagcatgacatgttcttaagaagatattag

SEQ ID NO: 93398 - DNA, 1164 bp, Leptospira licerasiae str. MMD4847
atgcaaaatatattaaatagtaatccgccagatgattcaggagccgattctttttctagatttatatatcaagctgatattgcctttccgtattgcattagatgcataatagacgaaaacatagtatccgttaccatggaacattacgaggatatcgtaatccaagaatctggtgatcgttggagatttattcaagtaaaaacaagaaatcctgaattgggtccttggaagttgagcgatgtactgggtgaaagcggtgcaatacatagtctctacagaacgtataaggaaatacagaatttcaatttttcattagaaatgatactcgagggagctatcaaaaaagatgatgacttaaattcttttaagaatggatcgtacaataagctaatagaaaaaaaagttcaagataaattagagatcgatgaatcggaggttaaaaaatttctctcgaaagtcactctgctcccatctccttcaagtcgagatgacattaaagttcgaaatcgtgatttagttcattcacaaaacccaagattacaaagagattctattcttagaattgaaaatattctgttaaccgaactgtcaaaagcaatgagcttggatagacttaaagaaggatggcctaagtatattattaatccagattcagaaattgaagaaaagatcaaagcaaaaactctgtctcgcattaccctttgccaattaataccagaattgcaagtttctcaatctttgagctatttacttacccagattacttccgctgataaaagcccctcggttgtttccactttggaaaggaaattacgaagaggaggaggtacagaagaaattatttcaacagccagaatgcttcgagcaaatacgcaaaagttccttatagaaaaaaggattattcaaggtgcaattaacgagagtattttagatgatctagatatcaggatcgaaactcaggcaaaatctcgactatcactatatgttaatggagataaccccgctatccacctttggaataaattactcgaagactttacctctatctcagataaaatcgacatgaatcaattgcttaatgcagatccaatgttactattaggcgaagcctgtcaaagggctgaggaatgcaagattagttttggtggcggatatgaagattga

SEQ ID NO: 93399 - DNA, 1863 bp, Leptospira licerasiae str. MMD4847
gtgagattaagaattactgaattaaacttaattggaagcaagcgtataatttcatttgaaaaagggctgaatattgtagttggaccgatcgcgactggtaaaacaacacttataaagcttttacgtgcctgtcttggcggatcattagagaaccttcctcctgaagcgaaagctgtgactgtcctcgaaatgactttgactattggcgaaactcaatattcgattactagaaacgcagtttccactccaacaagtttagtagatattgctggcggtaatgaatttataagactaccttttaccaaaaagactgatagcggtacaaaaaaaacttatatagaatggcttttagaaaaacttgaccttcctaaactcgaggtcccgtcagcgccgacaaaaatcgaaagcgaagcttccccggtaacaattaacgattattttctatattgtatccttcatcaaactgaaataggatcaagcatttttgggcatcttgattattttaaaaatataaagaggaaatatgttttcgaaattttatatgggatttacgatataaagattgccaatcttcaagaaaatttgcgagatattaaaacaaaaattagaatatcaagtaaccaggatgaattactgaatgatattcttgcaaagactatattagaaaatagagatgaaatcgagcataagctcttggaaacaaaacaaaggcttgtcgaaattgagaaagttactatctctactgcaaatgacattgataaagattcgaaagttagtgagataaaaaaaagcatatttgatttacaagacaagattcgcagtattgaaaaaaatattgctttagaagaagcatcaattgaatctttagatcttttatcttctcaatatcagtctcaatcaatcaagatagctaaatcgatttcgtcaaaaaaatacctcggttctattgagtttattttatgccccagatgtggaagccatcttgacaaaacacgaattgatgagtctcattgttacctttgtcttcaagagcctggccaagaggttacgagagaagaattgattaaagaacaaagaagggttgagagtgaattttctgaaattatcgccttaattgaagaacgaaaacgaaggatatcagatttaaataatgaattggtttcgcttcgagaaaatgaaaaggatttaaatgaagagttaaattttaggacttcaacattcatttcagaaaaactggaaaccctttcttctgtcggagaagaacgagcgaccttaaaggaaagaattgaaagattggaatcatatattgtgatcttttctaaaattgatgataatcgaagccaaattgataatcttaaagaagttgaggcagatttggaagctcaactggaaagtcaaaaaacaattttaaatttttctaggcgtaatttaaaagatctttccgagacttatagctctattttagagagttataaccctccagcttttggcgactcgacattaagcagcattaatgaagatacatatatacctacttttagaggaagaaaatttgaaactttaagttcaccaggtttgggtacattagtcaatgttgctcacgccttagcccatcaaatagtctccattgaaaagcatttaagattaccgaatattctgattattgatggcttaagtgagcatcttggacaggaaggtttggatccggaaagacttgaggcagtttataaatctattgttaatatttcagaaaagtataaagaaacgcttcaaattattattatggataatcatcatgtccctgatttcgctgagaagtatgtaaaattacgattaactgaagcagaaagactaattatataa

SEQ ID NO: 93400 - DNA, 1029 bp, Leptospira licerasiae serovar Varillal str. VAR 010
atggaacattacgaggatatcgtaatccaagaatctggtgatcgttggagatttattcaagtaaaaacaagaaatcctgaattgggtccttggaagttgagcgatgtactgggtgaaagcggtgcaatacatagtctctacagaacgtataaggaaatacagaatttcaatttttcattagaaatgatactcgagggagctatcaaaaaagatgatgacttaaattcttttaagaatggatcgtacaataagctaatagaaaaaaaagttcaagataaattagagatcgatgaatcggaggttaaaaaatttctctcgaaagtcactctgctcccatctccttcaagtcgagatgacattaaagttcgaaatcgtgatttagttcattcacaaaacccaagattacaaagagattctattcttagaattgaaaatattctgttaaccgaactgtcaaaagcaatgagcttggatagacttaaagaaggatggcctaagtatattattaatccagattcagaaattgaagaaaagatcaaagcaaaaactctgtctcgcattaccctttgccaattaataccagaattgcaagtttctcaatctttgagctatttacttacccagattacttccgctgataaaagcccctcggttgtttccactttggaaaggaaattacgaagaggaggaggtacagaagaaattatttcaacagccagaatgcttcgagcaaatacgcaaaagttccttatagaaaaaaggattattcaaggtgcaattaacgagagtattttagatgatctagatatcaggatcgaaactcaggcaaaatctcgactatcactatatgttaatggagataaccccgctatccacctttggaataaattactcgaagactttacctctatctcagataaaatcgacatgaatcaattgcttaatgcagatccaatgttactattaggcgaagcctgtcaaagggctgaggaatgcaagattagttttggtggcggatatgaagattga

SEQ ID NO: 93401 - DNA, 1863 bp, Leptospira licerasiae serovar Varillal str. VAR 010; identical to SEQ ID NO: 93399

SEQ ID NO: 93402 - DNA, 1077 bp, Pseudoalteromonas sp. S3431; identical to SEQ ID NO: 93374

SEQ ID NO: 93403 - DNA, 1728 bp, Pseudoalteromonas sp. S3431; identical to SEQ ID NO: 93375

SEQ ID NO: 93404 - DNA, 1068 bp, Bacteroides clarus YIT 12056
atgaatgcattaagtaatctagtaatgaatcagcctatagaaaaaggcggagcatgggcttctggtggtttctcttatcaatgtgattggggaatggacaaattattaaccttgcataaatctggcaatgactatattattgtttttgattatcatgatgatatagttgttttagatggagaggtaaacttgcaaaatgttgatttttatcaaataaaaaccagccacaataatcaatggactattaaccgattgacaaagtatgaaaaaggtggacattctattttatggaaattgttatctcatttcgctataataagttataccagaaatatatattttgttaccaatgattatttatcaagcagtatgctgaaaatagggagtacttctcaaaatttgattcatttttatgatttaaaaagtactactcaagcctcaataaagaaaagattagaaaaagaagatccgaaagtaaatattagcaagcttgataatttgtacttctttataaatcaattacactataatttgcataatgaaatcatgattggacgagtcactgattttataaaagaaagtaatttgagtccagatctgaagcctaaaatattttatgattcactacataatgaaatagaacgaaaaattcgttatgctacggatataacaagcgcagatgatttaattagtgaaaaaagttttactaaaaaacgatttgatatatatttgaatgagataaataattttgaaacattcaaaaggtcttgtgaaaatattgttggaatccttaacaacgacaaggttagttttaaaacaataaaggaattgcaaagatcatggaaagaaatacaggtcgatctaatggattatagaaattatgaaattagggaactgattaaatatatatcaagcgtttataaaaccactgagatagaagatgatataactctttatcaatattgttgtaaaatatatgatatggttgaaagggaatatgttaatcttatgagacatagtgagtattacttaaaggcattaattttatatatagtcaataatgagtaa

SEQ ID NO: 93405 - DNA, 1686 bp, Bacteroides clarus YIT 12056
atgaaaaaaataaagtttattcagatacaatttctttcttacagagaaaagagaggactaacaataaatcttgattatcatgttgttataataaaaggagcaaacggatcaggtaaatccagcttgataaaatcattatattattcattaggtacagaaatcgaggtttggcctcaaagatggttggatgctaatattatatatttattaaaatttaaaatagatggaataacatatcaatcacttcgcattggtaatgagataatattatataattgtgatggttcgtttagatttcgttctaaaaactcatgggaagtatctgataaattaactgaattattggggattgaattccagatgttagataatgagaataatgtgagagtaattccattaggatttttatttgctcctttttatattgatcaagataggggatggaactctgtttggaattctttttataaaattggtatacctaatggaaaatctacagctcaactatatcatgctggcatttatactgactcttataacaatgcaaaaaatagattgattctgataaagaaagaaattaaagagtgtactcgttctattgaactgataaaaacatttatcagacaattaaaaaaacagtttgataaaggaagtataaattacgatataaacaaatttaatgcggaaaaaaaagaattagttgaaaaatcagaagagttaaaaaaacttcaaaaaaaacacttaaacgagttgtcagagctatataaccaaaaaatatctctcgaatttcaattacagcaattagataataatatatcggaaatagaaaaggattatttgtttgcattgcaacaacgaaatattcttatatgtcctatctgtcaatcaaaagttgaaaatagtgaagtggggagatatgaaatgctgctagatatagaccaatctaaagatttaagattaaatctccaaagcaacctggatgatttgaatagaaaaattgatgcagtggaaaataaaacacaagttgttgtagaaaaaatagtagctatacaaaatttactggctataaaaagagaaaattactcgtttgaagatgtaatcgagtctttagtaaatcaaaaacttcatgatgtgatagatatgcaacgcaataaacttatggaggaaaagaataaaaaaatactattagaacatagtctaaatgaatcattaagccgattaaataataaggaaaagcaaaaaaatattgaggaaaaattttctaattctatcaataaagcatatatagcactttctataccgaattctaatcctaagcctaataaaattacaggtgttgtaaagggtgttggttctgctgcacctagatgtattatagcctataattatagtatgctagaaataataaatgggaattctagggctctatttgcaccaattgtcatagattctccacgtcaaagttctattgatgcagaaacaatgaagaagatgaataactatataataaagaacaagccagttgattctcagcttatattgggtattaacaaagatgatgaatttgatgcgacaaattgtcatctaattgaaatagagagtaatatacctttattaaaagaagaagaatatcaaggtgttaagaaaaatatagaaaagttattgagcaattctttttttaaatag

SEQ ID NO: 93406 - DNA, 1128 bp, Halomonas titanicae BH1
atggtgttggttgatcaaagcgtaaatgcaggagttagagcacaacaaggctttgctttgcagagaaacatggctcttttcattatacttgataactaccaaagcaaatttgatggagcgaagtacttcctatctcttgagcatttggaggacatactgttttgctatcttgatgaccatgggaaagcagtcaaagtagaaacctatcaatcaaaaaagaaatccaatggtagttggaaaatcggtgtcgaacttgccgagataatagtcaagatactccaagtcggtaaatcgctcattatagatgaatatccaaaatgttgcagctatagccatgacctgtacttctcatcaaatacaaacatacaactcgaaaagaaagtaaatagcttcgttgacaataaaaaacaaactagaacttatgctcatgctgtaaacgaggagaactctgaagtcatttatggtgagttagacccagttatacaaaacgctataactaccaagcttgaattacatgagtcgtataataacgacaaattgtttgaacagctagagaatttgaagttcttgtacatagactttaatagaacaaataaagaacaagagaatcaattaagaagcaaaattgaagatatttttgatcggaaagttagtgattccaaggcggcattagaatccatattcaggctttttaaggatatcgaactgacttacaatcaaaaaagcattgctagactttctgataaaacaaaacagatacaaagcaaagatataaataatgccataaagataattacaacaaaatctaaagcctttcaattctggcgtgatcataaaagagaagttggtcaaaagctagggattaaaccattcgaacgtgaaacatttgaaatgaaatttattttggcttttgatctatttaaaagcaaggatgaagctgaacatcagaaaatcctaaattttgtaaagttaaactatcttcaatgtaacggttttagcgaagacggctgcatagaagagctagttgaaaaatttaataatgaaattagatcaagcttggacgatcaaacattaaaagcaacgatgtatgctgcttactttgaagcaattaataaaatggatgattaa

SEQ ID NO: 93407 - DNA, 1731 bp, Halomonas titanicae BH1
ttgaccgtttcagtaaaatataacaatttctttgcttatagcagcaagggaaagaaatatttcaacactatattcgccgaaggtatcaatatagttcatggaaagaatacatctggtaaaagtacttttatacaggcgattctctatacatttggcataaatgatgaaaagagaaagcttgcagagattcttaatgaaggtgtgatttttagactcgacttcaccatctacaattctagctcaaaaaaagtttccattgtgagagatgatgaaattgtttctataaaagtggcgaaaaggccacctattaagtttataggtatcggcggcaacagatctagagagcacataaagttaaaagcgttcttgtctgaattgtttggttttacactgcatttagaatatgacaacgagtacaaaccagcttcacttgaagcaatgtttttaccttactacatagcgcaagatgttggctgggtttatcggcataaatcatttagaggtttggatttcgttaaaaatttcaagaacgatttctttgattacttccttggcataaggaataattatgatcgcctagagaaaagtcaactcgaaaaagaaaagaaggatctagaagcagaatctagacttcttcataagatagagcaaaatgataagaagctgaaacttgctaagatgaaggacgaagtgtttgcagaaaaaactaacgaatatataaagccttacaaagaaaacaagtcaaagttaatagagttagaaaaagaatatctttctttatgcaacaaaataacactgttagaagaaagcagaaaggttctacgtagagtcaagcgaagcttaagcaatgatattttagctgatacaaagtgcccaacatgttctcaacatttatctcattccgtagaagatacgtatagttatcttcaggacttaaatgacacagatcaacaacttgaagagttaagcagaaacattagaaatcttaaagattcacagggaatgctaaactctgtaatcaatgaaattaatgagaagaaaaaagtcgttgaaaaagaatactatgagcttttagaatacaaagtggataatgtcacgctggaatcatggttaaataacaaagtaagcgtcaaactatctgtacaattggagagaaggctaggcgaaatcacatcaaaaatatatgaagttgaaggtaagctcagcaaattcaagactgacgagatcgttaaaagagaaaggcgtagtgctagttacacctttaagtctatatttgaaaagcatgtttcagagttaaaaataaaaccatttgaagatgaatgtttctatttgttgtatgacattcctgcttttcctaggcaaggtgtggagcttcttaaaactctccttgcttacaatttttcatttgttgagatgataaagaaaactgaatacatacacgtatttccttttgttcttgacgctatattcgaaggtgactttgaagatgaaagtaagaatgagatacttagttttattaagaataatgcttcagtggatcagcagctaatagtttctatagcggattctaaaagcaatgctaactcagctgcgacatataacgaaaagcacttcaataaaaatgcaaaactaatttgcattggaaataatactaaaaaaagatcatttcttgaaaaatacaacggtgaattcgaagattacattgatgaaactatggaaattttgggttaa

SEQ ID NO: 93408 - DNA, 1131 bp, Photobacterium swingsii
atggttgatataactgaaagtggcgttgtaatcaattttgctcaggaggataaagaaaatgaagactctggagcacaaacgtttgcaaagtactggtatcagtataattgggctttgctacatattctgaataactgtatcagtactaatgagtgcgctattacgatggaaactcatgaagatgtcatgttcatcaatgatactaacttttcgaatgcgtctttagatttatttcaagttaaagaacgttctaaaacaggacgattgacagcaaataaaatttgttcaggaagcaaagacaaaccttctgttatatcaaagatgatttctcacattaacaagaaaagaatctctgaacgaattaacagaattgctcttgtatcttccactggatacaattttgatttggctaatccagaagatagtattgataaaaaagactacataagtttcgaccacctttcagaatctgttaaagatgagataaagaaagcagtaattcgtgatctggaaatttctgagatcccttcttttattcaatttattaatggaataaaaacaacatcattagatgaaagttccatgatgattgttggaaaaattgccacttatattgactctttagatccaaacttatcttcaaaaccaaagttgatttatgatgccatcgcaactgaattggttaagataggttgtgatactacccggtacaataaatgggaagactttttaaagcataaaacaatatcgaacactcaaattaataaaattattgatcgtcgctctataaacccaggtgtaaatgattttgaaagtatatggaacacattatttaattattttaatcatgaacacgaatataacaagttaaactttaagggaaaagttgaatttaaaaatcgactaaaaaaatatttttcattaagaatttcaaacaaagcgctaatttttgatgcttttaatcagaaagttaaatcagtcttttcagaatgttctgatgactcattatttggtactgtaaataacatagccaataatataagttcaacagatgattttgaaggtatctttgacagtgacgactttactattgtagatgcgattttttgtgaaatttgtgagtgtatatga

SEQ ID NO: 93409 - DNA, 1689 bp, Photobacterium swingsii
atgaaacagttaatattccatcaaatagcaataatctcagacttagagaagtccgcaaacatatttcagtttgcaccgaaaaagaatttgatactaggtacggcaaataatgttggtaaaacatgtctatctacatccattttttgggctttaggtatcgatgttaagcaacagaaatcatggaaaaaattagatgttaagactgcattagagttttctatttgtgatgatatgtatatcatcacaagatataaaaacactatgtctatattttatccaaacttatctaaggatacattctattctcttaaagatttttctttagctttttcaaaaataattgaatttaatgcatgtgtacaagttaaaggtgtaaaggacaattatgagatcccttatacttgtgtacaatttttgcgttcatttattcatcaagatttaggatggagtgaattatttaagtccctatcgattcatttctatactaaaactgaattaaataaagttgtcgattactttttaggtataaaacctgatgaatattttgaaccgttattaaaaagaacacctttaattaactcaacaaaaaacatcgctaaagacgtagaaaagattgattttgttcgtgataaacttgtgaattttaggagccccatcctaaaagattacatctctagtatatcttcgacatcatcagataataacaaattagattactatattggacaagagattgagttaaaatctcatttattcgaacttaaaaaagacttattttctcttaaggaagagcataaaattctatctcaagctgaaagtgaactttttaaagactaccaatatgctactaataatcttgagggacagtcattactttgccccacatgtggaacagagcatgataatgatatagtgtcgagatttagccttttatcagaacgtgatgatatatccaagtcaaagaaaaaaattgaatctgatattgtttccattagaaaatctataaaatccacaaataataaaattacttatgtgaaatcagaaatattaactcataaagttatttcaaatactcctgcgcatttagagcagcaaatcattgctcatgcaaaaggacattttgatgaaatgatgcaagatttatttttaaatgtcattaataaaagcactcatgaaatatctttactagacgatcgaattaactcgatccgtgatttcaagccatctaaagaacaaaaagataaaataaaaacgattaagagtgaattcatttcttcgctcttgaataatttcaaacttttaaacattgaagatatgcaagatattgacaaaaacaaaataatatataactttgatgtgagtggaagtgatatttctcgttcaattttagcctattacaaatctttgaatgatattagtgctaagtattgtaatgcatacactctaccatttgtattggacaccccttttcaacaagaacaagatgatgacaatgttagctatattgccgaattcttgtcagattgggacacccaacaactatttgtattcggtatgaatcaagctagttataaaagtctgctaagtgataaggaaaacaatgtaatttggctatcaagcaagaaagctttactttctaaagataactatgaatctattcgtaacgatttcgatgagttatttttataa

SEQ ID NO: 93410 - DNA, 1167 bp, Moritella sp. JT01
ttggttaaacttcatgacgtagctccaagagagcaaaatggtagagatactttatcaagatataaagtacaaaccagggctgctgggttagcaagtttagaaattcttaataataaagaggtagatcgtgtcttttgtgattggcatgatgattttgttattagaaaagtaattaatggaaaaacatactaccatttcatacaagtcaaaacgaaagataagcggaatgcacagtggtctctaattgagttgtttggagtaaataatagaaataaaaaagaagaaatagatgttgttgtcaataaaatcacagatagtttttctgggaaacttttaatacatactgttaattttaaagattcatgtgaaaaagtagtttttttaactaatatccatttgaaagatgaagtatatactctattggaagctttagatgaaagtgatttttcaaataaaacattagataagttacttgagcattttccccagtgtttctgtgatgatgaacaggtttattctacagatgaaattaaatccttaatttcgaaattagttatcgaatctggtgtagattatttaaatgtagaagggcgaggttttgattcgttagctagagagacaatacatcaatatagtgaaattgacctgaaaaatgttgaagcgaaagaaataataaacagtctattattgctaatagaaagtaaatctatgggcatactttctaatgctatcaatgaagaacaattagatcggttagctggcgttgggattgaagacttattaggaatattgagcttatctaaaactgccttccaaagtcttaaagatggcggtgatataaatgcattgaaaaatgtttcaataatacagaggttattagaacgttctgaagtaccgattggagcaattgaatatgctgcgaaatgtaaagctgagtgggactgttggtatcgtgataataggcatattctccctgattttgatttgatgacattaaattcagcgttagtaaaatcaattaaaaatcaccatataattactttcgatgagctgcaagagtctgttaatgacgttgctcttaaatttaaaggagtcgatatttttattggtttgagtcgaaatataatattaggcggtttattttctgtaatagtaaggtcacagtaa

SEQ ID NO: 93411 - DNA, 1770 bp, Moritella sp. JT01
atgaaactagaaagcttacggatatttgcaagaggaccttctggatggggttctggtgaactgaaatttgcagattctataacacagatatatggtcctaatggttcaggaaaaacaccgattgttcaatctatagcattctgcttaggtaacccatgtaagtttaggaaagatatatatggacactgcttaaaagctgttctgactgtttctattcaaggggatacttttaagttagagcgaccatatatagaagaggacaacttcgaaattatcgttacagaacctctaggcacaacgcagcggttttatagtgaaggtgattttagtcaatatttatttgagttattaggctacgattatccacaactcgttacagtgagagatcagccaactgccccattcatatcttgtgtgctacctcttttttatttagatcagagtaacggatacagtgacttctataaatcattaggcaatcattttattaaagatcaatttgaagaaattgttcgtttgagtgctaactttccagtaaagaattcatttgataaaaagaggtctcgtttaaatgcaaaaaatgatgttcagagtgctcatgaaaaagtgtatcgaattaaatccgtttatgaaagagcgctgaaatcgtcacaagtaagttactcttcaattgaagaaatagacgaacaaattgaaatatataaaactcaaatagaaaactctaaatcgagtaaaaatctaaaagtagatgcaacggataatattgataagataatttcattaaaaatgaaagaagcaagagaaattaagaatgaattatctcttttggaaagaaaaagtttaagtattacttcaataaaaacagagatcgaagcagaaataaatacgctctcattgaatgaagaatctaaaagaattttttcatcgttttctgaaatttgttctactcctggttgtgggttatttttaggcagttcagaatcttatgggaaaaatttattatatttaagagatcaaattaaagatttagagattagtgttcatcattccagagtcagtatagatattctaaatgaaaaattaactgatagattaaaggatattgaaatgttgaatgcagatagagacaatgtgtttaaaaatgatagtttaacaacacttgtcgattcaatgcatgcaattttatctgaaatagtcgagctggaagttcagaaaaaagagctcgaaaatttagttgaccttgaagagcgatacatcagtgctgaaaataatagagaagatgcattaaataaacaagatgctctttcatcagctccaagcactacatctatagagatgactagatttaagagtaattttaaaacgactatagaaaaatggatcgaattaattaagacaaaaaatatctctaaaattatcagttttgagcaaggttttaaagctatctttggagatgaaaaactgtcagtttttacaggtagtactaaggttcgaatcgtattatcttaccatgcggcactctttgaggagattattaagttaaaccctagaggaattagatttttaatattagatacaccgaaacaacatgatattggtaatgaagatttgaattattatattaaagctcttaaagtgttagcagcagagaaaaaaatacaaatcattttctcaacaactacttacaaatatgaaattggtgagaatgataaaaattggttagctactttcgaggggtttgagcaaccaatgtttttaggccaattgtaa

SEQ ID NO: 93412 - DNA, 1026 bp, Mageeibacillus indolicus UPII9-5
atggaatattcggactattatatgaatttgccattagacttagcaggtagcagaactaagaatagatttagagttgaattattgtggggtattagcaaattaattgatgcatataagcagtacgatgactatactgtcgtgtttgatttcaaatgtgacatcgagttacattatgaaaatggtctagatttttatcaggtgaaaacaaaaaatagtgggaatcatagctttaaaacactgactaatcgaaaagaaaatagtaaatctattttgggaacattatatgccctatacaatcctaatcaaaacgtgaagttggctgtggtttgtaataaacatttgaagattgctaggaatgaagacctaagagaagagatatgtttaggggagttggataaaacagtaatagattttattcaagataaattgaaagaagaactgaatttgtcagatgttgttcttgataatgttttttatatttgtgaaggtatagatctaataaatcctcactacgctttgattggaaagttaattgaatcttttcaagaaattaaaaatgaagagcctaataatccgaacgctttatatagattagtatctgagacagcccagaaaaaagcttcttatgagatggcaataactaattataatgatgttctagagttaaaggggatttctaaagatgagtttaataaaatgcttgaatctcatagaaaaaaatctataactggtattgagcaagctaaaaattacattaaaactttatatccagccgaaagaagaatgtataatcaagccttaactaatttgctagaaattgatcatagttatgatttgaatgtattaaaggcatcagtttttgaatatattaaaggaaatatagataagattaaaagtgaaggtgaacttttttgtgttttaagtccaatatttgacggaaaattcccgatggaatatacacaaattatgaagaatgtattttacttattagtattttatatatacacagatggaggtgatatttaa

SEQ ID NO: 93413 - DNA, 891 bp, Mageeibacillus indolicus UPII9-5
atgaatgtaatttttaaaaaaatatacatttttgatattttaactaaaaaagcttttgttacaagctttgaagaaggagtaaatgttgttacgtctagcagtattgatggaacagatagaggaaaatcggtattgttgcgtagtttatatcatgttatgggagctgatgcccacttcgataaaaaatggaaaaatgaagacaaagtatatcttttagagtttatggttgataataaaaaatattttatatatcgccatagaaagttatttaaggtatttaatgatcttattcagatattatttcaaacatcatctaggccagagttatcagagtttttaggtgaaatttggtcttttgaaatatttttgccgaatagaaatactgagaagttagagattgctccacctgcgtatacatatgtgatgaatttccttgatcaagactattatgatggaactaatttcaattcttttaagagtttaggacaatatcaaaatttcaaacctgatgtaatctactctcaatttggaatatatgataagaactattttgagcgtgttaaaagcaaacaaaatttatttgaacgcattaatgagtctaaagactcatataaaaaagcggatgaaatgaagggaaaagtatctaatttattagagaatgtagttgttcctgaaaatttacaagaactagaaagagaactttctattaaatcaaaggaatataacgatatattgaattctatgaatgcgtttagatataagcttactaatttaagaaatgagaaatatgagctagagattgcattgaaccaaattgagagatttaaaaataataaagaaaaagaaataaagtctattttagagacggatatctgtcctgaatgtcattaa

SEQ ID NO: 93414 - DNA, 912 bp, Acinetobacter sp. WC-136; identical to SEQ ID NO: 93230

SEQ ID NO: 93415 - DNA, 843 bp, Acinetobacter sp. WC-136; identical to SEQ ID NO: 93231

SEQ ID NO: 93416 - DNA, 1029 bp, Mogibacterium sp. CM50
atggataaagaaaagtactacatgaacttaccaaaagatttatctggaagcattgctaaaaatcgctttagattagaattattatggggaattagtaaaataatagatgaacataaagcaaacaatgaatatacgataatttttgattttaaatgtgatatcgaactgcataaagatgatgaattgaatttttaccaaatcaagacgaaaaaaagtggtaattataattcgaataacttatgtaagaaaggcaagaatgagaataattctattttagggaaattatatgctttatattcaccaaactacaatataaaattagcaattgtatgtaataaacaacttaaaatcaataataaggaaattgattttcctgagcaatgttttggagatttagatcaggatgtacttgatgatgttagggaaaagttgtgtacagaattaaatttaaacactgtgtgtttagataatgtattttatatatttgataacatggatttattaaatccagaggattctattagaggaaaattagtaaaatctttcgttgatattaaaggcgaagaacctcaaaatccgaatgcattatatagactggtcgttgattctgttaaagaaaaagcttcttatgaatttgattcctgtacttatgaagatgttgtaaaaaataaaggtattacaagaagtgaatttgataaaatgttaaatgcacataaaaaggaatctaaaaatggaatcaatgaaacacaggagtatataaataacctgtcatttgctaagcgaagaagatataatacagcactgggtaatatacttgaaacgcagcaaagtgagtctttacgattaataaaaataaaaatttataattatattatggaacatgaagactcattagacgatattgaaagttatttaaaagaaatatcaaaattatttgatgacgattttgatgtggaatttaccgatgatatgaaatcagttcaatacataatgatttactatatgtatgcttcaggaggaattttataa

SEQ ID NO: 93417 - DNA, 1683 bp, Mogibacterium sp. CM50
atgaatgttatatttgacaaaatatatatatttgatgttgtaaaaaaagaggcttattcaacagaatttaaaaaaggagttaatattattacatcgagtgatatagatggaacagatagaggaaaatcagttttattaagaagcttgtaccatgctttgggtgcggattctcactttgactcgaaatggggagaaaaagataaggtctatattttatttttcaaggtggatgataaagatttttcgatttatagatctcaaaaattatttaaaatatttaatgcaaaaggtgatattatttttactactattcatagaagtgaattagcagatttttttggcaatttatttaatttttctatatggttgccgcaaaaaaatacaaatcaattagtaatagcaccacctgcatatagttttttgctgaactttttagatcaagatgaatacatcggtacaaaatttaattcgtttaaaagccttgctcagttcagtaattttaaacttaatgttatttactcacatttgggcatttacaataaagaatatttcgaacttgtgaaacaaaaagaagaattagaacttgaaattaaaagtaagagagaagaaatagaagaactaattaaaatgaaagacagaaccaatttaattttggatggtttttcatgtccggaaacaagccgtgccttagaaaatgagcttaatatagaaactcaaaaatattcatcgctgattaatgaaatgaattcagtaaggaataagcttgttgatttgagaaatcaattagttgaacagaatatcactttatctcaaatatctaaatttgagataaaagaagaaaaggaaataaaaactattttaaaatcaaaagtttgtcctgaatgtcattctgttttagattcgactttggaactaaggagtaagaggtataatcatattgataatgctcttagtctgaaagatgcaataaaaacagaaaatgcccatattgaagatgaaatactcaaaaatgagggaatatattcaaacttggctttggctttggaggagcataataaaaagatttgtaaaaacaaaaaggaaatcaaagactatatcaagttcagaggactaaataaactaatcgatgagattaataatgatttgactattaatagcagaattatcgacagcacaaaggaggctctaaaaccactaaagaaagaatttaaaggtgttaaagataaaatgaaatctgttgatgaaaattactattatttgattgataaattaaaaataagattcaatttaaatgagttggaagctgacagttacgaacaactatctaaaaatttttgtgcaagtggaagcaacaaaccattatcaactgttatatggtatctaacactcaatgatttaaaacagaaatttaatcctgaaggaacaacatttccaatggtttttgatagccctaataatgcggagacagaccaagagaagaaacaggcattagtcgagtatattatggaatcatcagatcaatttagccagttaattgtttcggcaataggattttcagaaaaagattatagcattaattcgaatataaatataaaagttttagaaaatgaaaaatatagcttactaaatagtgagatgtatgttcagaattatgagcttttgcaatgtatgaacgatgcttaa

SEQ ID NO: 93418 - DNA, 1029 bp, Veillonella sp. ICM51a
atggataaagaaaagtactacatgaacttaccaaaagatttatctggaagcattgctaaaaatcgctttagattagaattattatggggaattagtaaaataatagatgaacataaagcaaacaatgaatatacgataatttttgattttaaatgtgatatcgaactgcataaagatgatgaattgaatttttaccaaatcaagacgaaaaaaagtggtaattataattcgaataacttatgtaagaaaggcaataatgagaataattctattttaggaaaattatatgctttatattcaccaaattacaatataaaattagcaattgtatgtaataaacaacttaaaatcaataataaggaaattgattttcctgagcaatgttttggagatttagatcaggatgtacttgatggtgttagggaaaagttgtgtacagaattaaatttaaacactgtgtgtttagataatgtattttatatatttgataacatggatttattaaatccagaggattctattagaggaaaattagtaaaatctttcgttgatattaaaggcgaagaacctcaaaatccgaatgcattatatagactggtctttgattctgttaaagaaaaagcttcttatgaatttgattccggtacttatgaagatgttgtaaaaaataaaggtattacaagaagtgaatttgataaaatgttaaatgcacataaaaaggaatctaaaaatggaatcaatgaaacacaggagtatataaataacctgtcattagctaagcgaagaagatataatacagcactgggtaatatacttgaaactcagcaaagtaagtctttacgattaataaagataaaaatttataattatattaaggaacatgaagactcattagacgatattgaaagttatttaaaagaaatatcaaaattatttgatgacgattttgatgtggaatttactgatgatatgaaatcagttcaatacataatgatttactatatgtatgcttcaggaggaattttataa

SEQ ID NO: 93419 - DNA, 1683 bp, Veillonella sp. ICM51a
atgaatgttatatttgacaaaatatatatatttgatgttgtaaaaaaagaggcttattcaacagaatttaaaaaaggagttaatattattacatcgagtgatatagatggaacagatagaggaaaatcagttttattaagaagcttataccatgctttgggtgcggattctcactttgactcgaaatggggagaaaaagataaggtctatattttatttttcaaggtggatgataaagatttttcgatttatagatctcaaaaattatttaaaatatttaatgcaaaaggtgatattatttttactactattcatagatgtgaattagcagatttttttggcaatttatttaatttttctatatggttgccgcaaaaaaatacaaatcaattagtaatagcaccacctgcatatagttttttactgaactttttagatcaagatgaatacatcggtacaaaatttaattcgtttaaaagtcttgctcagttcagtaattttaaacttaatgttatttactcacatttgggcatttacaataaagaatatttcgaatttgtgaaacaaaaagaagaattagaacttgaaattaaaagtaagaaagaagaaatagaagaactaattaaaatgaaagacagaaccaatttaattttggatggtttttcatgtccggaaacaagccgtgccttagaaaatgagcttaatatagaaactcaaaaatattcatcgctgattaatgaaatgaattcagtaaggaataagcttgttgacttgagaaatcaattagttgaacagaatgtcactttatctcaaatatctaaatttgaggcaaaagaagaaaaggaaataaaaactattttaaaatcgaaagtttgtcctgaatgtcattctgttttagattcgactttggaactaaggagtaagaggtataatcatattaataatgctcttagtctgaaagatgcaataaaaacagaaaatgcccatattgaagatgaaatacttaaaaatgaggaaatatattcaaacttgactttgacgttggaggagcataataaaaagatttgtaaaaacaaaaaggaaatcaaagactatatcaagttcagaggactaaataaactaatcgatgaaattaataatgatttgactattaatagcagaattatcgacagcacaaaggaggctctaaaaccactaaagaaagaatttaaaagtgttaaagataaaatgaaatctgttgatgaaaattactattatttgattgataaattaaaaataagattcaatttaaatgagttggaagctgatagttacgaacaactatctaaaaatttttgtgcaagtggaagcaacaaaccattatcaactgttatatggtatctaacactcaatgatttaaaacagaaatttaatcctgaaggaacaacatttccaatggtttttgatagccctaataatgcggagacagaccaagagaagaaacaggcattagtcgagtatattatggaatcatcagatcaatttagccagttaattgtttcggcaataggattttcagaaaaagattatgtcattaattcgaatataaatataaaagttttagaaaatgaaaaatatagcttactaaataatgagatgtatgttcagaattatgagcttttacaatgtatgaatgatgcttaa

SEQ ID NO: 93420 - DNA, 1020 bp, Halomonas sp. TD01
atgcatgatgatttcgtagtacgactcaacagagatgatcaatttttctatatattctaccaagtaaaaaccaacagcaaaaagaatcacaattggacattgaatgaaattttcggattgagctctagggttaaagatttatcaaaacacaaagatattgatattttaaacagctttgctggaaagcttctcttgcataccgttaattttggagactgctgcgaagcagttatttttcaaacaaatattaatattgaagacccaatagaaaacttgttaaatgacattcaatgtggaaagtttgaaaacaaaatagcaaaattgcttgagaagcgcttccctgcatgcttttcatgctcagaacttagctctgacaaagtaaagataaatcttaagaaattaaaatttgaaaccgatgtccagtatataaaattagagacaaataattttagttcgattgccaaggatgctatatacaaatatagcgaaattgatttaactcacgatgaattcaaagatattttagtaaaacttgtcgagttggttgaggcaaaatcatctggagttatcaatgaactcagccaggcatccttagaaacatactccggcatatcgatttatgatctgcttgagattttaagtatatctaaagcagcatatactgcgcttatagatggaggggatcccctcgccgtaaaaaattcttcaattattcaacgaaccttgagcgatgcaggagcaagtgaagtccaaatagaattctgttctcgctgcaaaattgagtgggatgagtggtttagaaataacaggcatgtactacccgagttaacagtaatgactgttcaatctgatcttgccagcatactgcgagatacaatggcctcaggccggcttaacctttcttcattagaaaagcctattaatgattacaaggctaaaatagaaaatagaaattatggcctcagtgataacgccattttaggtggtgttatggctgaactcgtaagggtgcagagatga

SEQ ID NO: 93421 - DNA, 1773 bp, Halomonas sp. TD01
atgaaacttaaaactcttcaaattcattcacatggtagctatggattaggctgcgagcctttagacttttctgatcatattacgcatatatatggcccgaatggttgtggaaaaacgccaataataaaatcaattgctttctgtctcggctatcctgctgtttttagaaatgatatatatgaccgatgcaaaatggcttctttggaagttgaggtcgatcaaaattttttgagaattgagcgccaactatcaagagaatttgatatagaagtaattgacagaaatggaataaggcaaagatttttttctgaaggtgaattttcggaatttttattcaaaatactcaagttagattatccgaatcttgtctctaatcgcggagttgtaactaaaccatatatttcaacactaatccctctagtttttactgatcaagacaatggatattctggagtttatgcttccccaggtagttttattcaagaccaattccaagaaatggttagattattatttggccttcccccgaaaaatttctttgatgcaaaaaaggaacgaattgatagcaaaaaaaatctcgaatatttagatcttgaggttaagcgaaaagaagatgaattaaaaacagctaaattggccactgaagttatagggcgttcaagtgaagaagttcttgttgagattgactcacttgaatcagaactaaaatctataactacacaaaattccactaaagccgactctattcgggcttttgacaatttaatctcacaacaactagcccaaatcaggacgcttgaggcaactctattagacattacgaaacggcgtaaatctttaaccataatgatcgacgagatcaatagtgaagcgaatactttgagcttgaatgaatcctccagacaaattttcatgtcgtttgaggaggtttgttctaatcctaaatgtggtttatttgcctcaagctcgaactcatacgcaaaaaatttactttacttaaaagatcaaattaaagatcttgttagaaatgatgcctcatatagtcgtgatgagatgcggattgaatcgcagattttttccaatacagaatctgtaaaaaatctattggcggaacgaaagaaacaagaagataatagtgaaatagccgcattagttgcttccgtatcaagcttaaaagatcgaatatttcagttgcaattgcaattatctgagtacgacaaactatctgaacttgaaaaagaatacgtgctctatctaaacaagagaaatgatgccctagaaaaatatgaatctactcaggtatcgcgttcaaatactcctgatttaatccgcgttcgttccgatcttcgaaaattatttcttgtatggcttgatcgtttgcatacgccaagtaatgttagcagggacattacgtttcgaaataatttcgaaccagttatgggaaatgaacagatttcgcagctttcaggaagcacaaaagtaagagttgtactggcatttcatgcagctctaattgaaaatctggtagcaaataaatcacctattaaattattagttttagatacgccaaagcagcacgaaattaacaacgatgatctagacagatacttcaaggcattaaaaactgtatgtgaggccggagatgtccagattattttctcgacaacggaatacaagtatgtaggtgataagtttgatgcgacgtgggagcctagatatgacggagacgagcaaaaaatgtttatgcgaagtatcggatcgagtggcgcttaa

SEQ ID NO: 93422 - DNA, 906 bp, Clostridium sp. SY8519
atggtctttgattatgcctgtgatattgaaatacattacaaggatggctttgagttttttcagattaagacgcatgggcgctgtaagtcatataccacaaaaaggcttactaaagttgagggtgaaggctcgattctaggcaagctgtatgttctcgcgaaaggtgacttagcaagaagtgtcagggtcgctgttgttagtaatgtcccatataactcaatgcccgccgatcagttaatcaattgttttgtaaagctgcctgagaaggatcagagggaaattgagaaagcacttaagaaggaactgagtatagatgatatcgatttcacaaagatattttatattcagacaaatatggatctagagcatccggatgatgccgttcgcggtaagttaacctttgtctttgagaaaattaagaagtgtgaacctacaaatccaaatgctctttaccgcctaatcgttgacactgtttctgataaagcgtgttatgaatattctgctgatgattatgaggaaattaaaagattaaaaggcctttcaaggaaccagtttgatgaattactggaccttcatgcagagaaatcaaagacgggatttcaggcggcagtcgaatacatcgaaagtttgcctggtgttaaagaacgaatgacttataagcgatcattgcctaacgttctcaagttgttgtctacttcttggaatattaaagaaatagaaaaggaaatatccagatttctcttggtacatgacgttggagatactgatagcgctatagatttattgatttcaaaattcaatgatcgatttccggtagaagtaagtagagcagatagagtcgtattatatattgttattcttaaacgatatgaagatggagtgtatggatatgaagatgacatttaa

SEQ ID NO: 93423 - DNA, 1683 bp, Clostridium sp. SY8519
atgaagatgacatttaaggagttatatcttttctccccacaagaaaagaaggcaaagaggatctcttttgaagaaggagtaaatgtcattacttctaatcaggaggatggcactgacagaggtaagtctgtcgttatgcgtagtttgtaccacgcccttggtgcagaaagtcattttgaaacgaaatgggacacaaagagcaagatatatatcctacatctgtttatcgatgggaatgggtattatatttatcggtctgctgatttatataaattttttgatgagcataaaaaacttctgtttgtgtctacacacagccacgagttgtctgaaaagatcaaagagtttactggatttgcagttatgttaccgggaaggacaagtgagaaactagagataaccccgccagtgtataactatttaccgtttttcttagatcaggatcattatgatgggagcaagtactcatcattcaagaacctacagcaatatgcgaattataaagactctgtgctgttttatcatcttgggatatatgatgaatcgtattttgagcttgtaagaacaaaagaggcgttgtcagaagaattcagcgctcataagtcgcggcttgatatgctccatgcaatgcaaagtgatatagaaagtagacttggaacaggggcctattctacagacattgatgcattacgtaaagatgtcgaactatatcgcaaagaatacgctgatgtgctgtcaaagcttaataagtgcaaagcgagattggttgatctgagaaatagcttgtttgaatacgaagcattgcttcatgagatgagctctctttcagatgccaatgaaaaagaaattaaacagctgattgaacacaagtgcccagaatgtggatccgtaattacagaaactacttctttaaggagcaagcggtacaaccttgctgaagatattgtaacagttaaaaacgaattacaagtctcaatacaaaatgctacgcaggatatcgaaaaggaagaaaagaagtaccagagtctgttagagcagctggcggcatacgaggccaaagttaaaatcaataccaagcaggcagatgacattatccgatataaagggttatgtgaaatccgtgagggaatcatagcggaacgtcatgacgtgtctgatctcatcgatgaagaagatgagaaactgaaggaaatagctaaggaaataagaaaatacggagaaaagaaaaaacgtattgaagacaaatactatgaactactggtaaccgcaaggacaaagtttgggctgagtgaaattgagcccgaaaaattcaagaaacttaccaataactttgttgctagtggaagcaacaaaaatatagccacagtaatatggtatttggcaatcttgaatttgcgccaggaattcaatcccaatgcaattgaattcccgatagtgtttgatagccccaataatgttgaaactgataacgtgaaaaaacatgcattgttgcagtacattctcgacaatgcaagcggcccacagcttgttctttccagcattggctttgataaaacagagtttaccaccaaaggaaatataaatgttattaagttggaaaatgcaaaatactcgttgctagacgatcagtcctatacagagtacaaaaacatattagatgtattgtgtgatgcggagatttga

SEQ ID NO: 93424 - DNA, 1029 bp, Streptococcus tigurinus AZ_3a
atggataaagaaaagtactacatgaacttaccaaaagatttatctggaagcattgctaaaaatcgctttagattagaattattatggggaattagtaagataatcgatgaacataaagcgaacaatgaatatacgataatttttgattttaaatgtgatatagaattgcataaagaggatgaattggatttttatcaaataaagacgaaaaaaagtggtaattacaattcgaataatttgtgtaagaaaggtaagaatgagaataattctattttagggaaactatatgctttatattcaccgaactacaatataaaattagcaattgtgtgtaataaacaacttaaaatcaataataaagaaattgattttcctgagcaatgttttggagatttagatcaggatgtacttgatgatgttaggaagaagttgtgcacagaattaaaattagacactgtgtgtttagacaatgtgttttatatatttgataatatggatttgttaaatccagaggattctattagagggaaattagtaaaatcttttgttgatattaaaggtgaagaacctcaaaatccgaatgcattgtacagactggttgttgattctgtcagagaaaaagcttcttatgaatttgattccggcacttatgaagatgttgtaaaaaacaaaggtattacaagaagtgaatttgataaaatgttaaatgcacataaaaaggaatctaaaaatggaatcaatgaaacacaagaatatataaataacctgtcatttgctaaacgaagaagatataatacagcacttggtaatatacttgaaacgcagcaaagtgagtctttacgattaataaaaataaaaatttataattatattgtggaacatgaagattcgttagacgatattgaaagttatttaaaagaaatatcaaaattatttgatgacgattttgatgtggaatttactgatgatatgaaatcagttcaatacataatgatttattatatgtatgcttcaggaggaattttataa

SEQ ID NO: 93425 - DNA, 1683 bp, Streptococcus tigurinus AZ_3a
atgaatgttatatttgacaaaatatatatatttgatgttgtaaaaaaagaggcttattcaacagaatttaaaaagggagttaatattattacatcgagtgatatagatggaacagatagaggaaaatcagttttattaagaagtttataccatgccttgggtgcggattcgcactttgactcgaagtggggagaaaaggataaggtctatgttttatcttttaaggtggatgataaagatttttcgatttatagatctcaaaaattatttaaaatatttaatgcaaaaggtgatctcatttttactactattcatagaagtgaattagcagatttttttggaaatttatttaatttttctatatggttgccgcaaaaaaatacaaaccaattagtaatagcaccacctgcatatagttttttgctgaattttttagatcaagatgaatacatcggtacaaaatttaattcgtttaagagccttgctcagttcagtaattttaaacttaatgttatttactcacatttgggcatttacaataaagaatatttcgaacttgtgaaacacaaagaagaattagaacttgaaattaaaagcaagaaagaagaaatagaagaactaattaaaatgaaagatagaaccaatttaattttggatggtttttcgtgtccggaaacaagcagtgccttagaaaatgagcttaatatagaaactcaaaaatattcatcgctgattaatgagatgaatttagtaaggaataagcttgttgacttgagaaatcaattagttgaacagaatatcactttatctcaaatatctaaattcgaaataaaagaagaaaagggaataaaaactattttaaaatcaaaagtttgtcctgaatgtcattctgttttagattcaactttggaactaaggagtaagagatataatcatattgataatgctcttagtctgaaagatgcaataaaaacagaaaatgcccacattgaagatgaaatactcaaaaatgagggaatatattcaaacttaactttggctttggaggagcataataaaaagatttgtaaaaacaaaaaggaaatcaaagactatatcaagttcagaggactaaataaactaatcgatgagattaataatgatttgactattaatagcagaattgtcgacagcacaaaggaggctctaaaaccactaaagaaagaatttaaaagtgttaaagataaaatgaaatctgttgatgaaaattactattatttgatagataaattaaaaataagattcaatttaaatgagttggaagctgacagttatgaacaactatctaaaaatttttgtgcaagtggaagcaataaaccattatcgaccgttatatggtatctaacactcaatgatttaaaacagaaatttaatcctgaaggaacaacatttccaatggtttttgatagccctaataatgcggagacagaccaagagaagaaacaggcattagtcgagtatattatggaatcatcaaatcaatttagtcagttaattgtttcggcaataggattttccaaaaaagattatagtatcaattcaaatataaatataaaagttttagaaaatgaaaaatatagcttactaaatagtgagatgtatgttcagaattatgagcttttgcaatgtatgaacgatgcttaa

SEQ ID NO: 93426 - DNA, 1095 bp, Paenibacillus sp. HGH0039
ttgttgctaagagatttagtcgtacagaagaagccaagagaaacgagtggttcacgttctgctaaccgctttgattttcagaaggattgggcaatattaaagcttttcgaattgcatcaatgtaaggacgattatcttcttgttctagactatcatgacgatgtaatggttttggattcagagcgtgatccccaatcagcagctttctttcaattaaaaacgaaagataacggggtttggaagctaaatgatatcgtaaagacgaaaaaagggaagaaaggcctattaccatcgattataggtaaattatatgactgtaaattgaccttccccaatcatactttgtcactcactttggtttctaatgcttgtttcgagataagcttgcagaatcatgttggaaaaagcacagacaaaaaatcaatatgttttacggacattgagcagaaagacttgaacaaaatcattacggcaattaaaacggaacactctttgcaagaagaacctgatttcgtggaaatcacatttctagaagttactgatttaaatattaaagaccgagaaacttacatgaaaggtaaacttcacgaattcttagagtctatgaatcccaagaacggtaagtttcgattgagtttaatttataatacaatttttggggaagtaaaacgaaaaaatgattatgagtggagcgtttcagacttcgatgaagtaaagaagcataaagggattagtcgttctcaatttcaagaaatgttgaactatttcgacattgatgatgaacttgaacaaacgtgggaagaaatttcgaaacggctaaacgctgataaagttgattttaaaaagataatgaaattgaaagctgcatggaaagaacttgaaatcgttcagatggatgtaaccaatgaatactttcaatctcaacagcttgtcatacgagaggtcctaaaagtaaaagaagaactacctacaatacaattatatcaagatttagtggagtctgtgtatgccgagtataaacagcgagaaccaaaaagtatgttagatgaatatctaattaaagccataacattactggagtattgccgctcatga

SEQ ID NO: 93427 - DNA, 1689 bp, Paenibacillus sp. HGH0039
atgcaaagattaatcttcaaggaaatcaaaatactctcaagaaacgagcaaagagcaagaataataaaatttcatcccaaaatgaatctcatcaagggtgagaaccatgtcggtaaatcatcgttgatcaaaagtatttattatacattaggcgctacacccaatgtgatgcatcctaaatggatgggggctgagccaatttgtttattgactttttctgttgatgatattgaatatttcatattacgtagaaagaccttttttgcagtatacaacagtgtaaaagaatgtattgggacatttgataaaattactgacggtttgggtccattcctatccaatttattgaaatataatattgagctggcaaataaagagaatagacttattacgcctccaccagcttatttctttttaccgttctacttggaccaggatagttggtataatccactttcctcttttgctcgtctaacacagctaaaagggcaatggaaagcaagcatgttacattttcatacaggtatcaagcccaatgaatactatcatgcaaaagggcaaattgaaatcattaaggatagcaatcgtcaattagaatcacaaatgaaggtatccataaacgttatgagcaaattaaatgaacagatgggacaaatgatattggatgctgacttgaataattttaaaaaagaagttgacgagttattggaacagtatgagcaattaaaagtaaagggagaagtattgaaacgaaatatcgttgacctcaataatgagaaaatacattttcaaaaacatattaagctgttagagaaatcaatacatgaactgaatgatgactataagtttgctctttccattccagatgaaaaaattgattgtccgacatgtggtgctgtgtattccaattcatttgtagaacgattctctattgcaaaagatgaagaccggtgccatgatttgttagaggaattgaaaatgggattacgtgaactagagtccaagattaaaattgagtatgaattgtatgaagaacacgcagtcgagtctgaacgcattcttagcctcatggaaaataaacaaggagaagtgcatttaaaagacataatacagaatgaaggtaagaaaaatttgaaatctattgttcaggaagagcttgatgaacttcgtagtcagatcgcaatgaatgaagtaagcattaatgaacttaaaaaggaaatgaaatcatatgaggatagaaagcataaaactaaaattgaaaagtattatcgtgaattaatgagtgattatttagatgatttgggtgtggaaaccgttccagaaaaatcatataaaacgataatttcaaaagttactgacactggaagtggtgcgcctagagcttatcttgcgtattattatagtctgttgggtgttattaataaatactcaacttctacgttctgtccaatcattctagactcaccaaatcaacaagagcaagataggtcacattgggatatgattaaggattttattattacaaagcagccgttgaattctcaacttatcttaggtacagtagagtttggggaccgacaattcgaaggggaaataatagagttaaatgaaaagtatcattttcttcaagaagaagactttgaagaagtttcccatgagataaatgaattattaagttttatttcataa

SEQ ID NO: 93428 - DNA, 1167 bp, Methylophilaceae bacterium 11
atgtctatatccaaaaccatagctattcatagtaaacatcgaattaaagatgacttagataagttgctttcggataatcccaaagatgaaaaacaaggtgtacacgccactctaggatttacttatcagcaatggtgggccactttaaggattgtagagttacttgctgaacccgatcaatttgctgtcggtatggaatttaaagaagacgtgtctattatagatgacgatacaacaccttctaaaattgaattctgtcaaattaagaaaaatgaacaagcgggtgcgtggacactagaagaattgcacaaaaaaggaagaaagttgaattccggtcaatacccaccctctactctagcaaagctttatcaacgattccatgattttcagccatatttaaatgcacgtctcagatttgtatcgaatacaggcttcaaaattaaagtgaatgataattcaattcattcacacgatttccattttaaagatttgactaaaataccaagtgacttgttaaaaaaagctattggcaaccagttgaacatacctccgacatccgtcattttgaaagatttttcattacaccgaacaaatttgccacttaatgaggagaatatatttgttgctgggaaattatctgagttaaatgatcattcgaagttaccattcaaaattctcaaaccaaccatcgcagccagagtattagcttccgaactccaatctagagcatctaatactagttattgcagcacttttggagaattaacaaaaacgaggtttatgtccagatctcaagcaatagatgttctagctaactcaaccagtaacaaaaaaagtctaagtgagattttggattcggcaattcagatacttaattctgatcattatccatttaggttagtacagggtatagaaaatgtaagaattcaagtttgtgttgatgcagtggaaagaaccaatatactttttataaatactgtaaaagctttgaaacttgcgtatgcaattacatcttctcaagaaaatttaagcagtttacgctcacttttggacgaaactgtagaaattgcaatacagacttcgcctgaaatactagaagttgagtcccggcattatataaatactgctgctttactggttatctacaatgcaatcgaccttaactaa

SEQ ID NO: 93429 - DNA, 1902 bp, Methylophilaceae bacterium 11
atgaaccgtcgcgtgacattcaaaacactctggctaatatcagaaaaacaaaagaaagcaaggaagcaaccgttcagccctacgaaaacgctccttttaggaaagaacggaacaggtaaatctagagttacaaagaacttatactatgcgttaggtgctaccccacaaaaactcaatgtgggactttgggatcctgaaactgtttcagcattagagttttcttataactttaatgactacctagtaattcattccggcaagctccaaggcattttttctagagaaggcttgcttttctcatcgtcaaatgcatctgcttggacgaaattcattagcaatttttttggatataagttgcaaatgcagaggccaaaccaaagcaggttcagccaagccggaatggattacttaactttgcctttctatttagatcaagacggaagttggggtacttactggaatacatacacatcattgacacaattcaaagattggaaaaaacctgtttttgaatcatttattggattgcgacctaatgcctatttcggacaaaaacaactccgggacgaagtcgcaaatcaaattcaagagaaacagaaagagttcgaagcacagcgaagtgcttttaaaaaagttgaagattatcttcctaaaaatttgccctctcttcacatgccacaatttagagttgagctggcagctgtaggtagagaggcgttgaaaacccaacaaaaacaattatcgttaagatcaaaattaattgcagcaatgtcgcttaagcaaaaaatccgcactgagctcgaaattgttgaaaacgccaataaggaactgattgctgatttagtctatatttccgatcattcaaattttcccgataaagctccaaagttatcaagtactaccagccaaagaatcagatcaactgacttggcagtcacaagcgattttattatttacaaagctatgcctgaatttaatgtgctgacagaaaatgataactcaatccttaattcctctgtgaatgcagtggatattgtggagtgcccaacttgtggcactgttcatgaaaattcttttcacgccaaagtacaattatcagaagatatagaatccttagatgccttaaaagacgaacttgagaataggctagtaggagtatgccgggaagaagctaccattagaattgatatcaaatcagttgaaaaatctttaagcaaactagatgaaatgatgcaggaaaaaaaatcaaacttacgcttgggtgaagttatagctgcacatagtaaaaaaactctcaatacagcatttcataaaatcacttcggaattgtcagaaatactttttatactaaaccaagaagaaaacattttaaacgagaagttgaagaagtatacggatgcaaaaagagttaaggaagttaatagctactttgcttcacaggtaaagtcaatttctcaatctctgaatattccgccagatgagcagatccaaaaaccaaaaccacaatcaagagctcataccggggggagttcagcacctaggtcaatgctagcagttcatcttgcgatgatgaaaaccaatgtagagtttggggattcaccatgttttcccttcgttgtcgacacaccccaacaatcaggtcaagatgatattaatctccgctctatgattgacgaacttgggcgtcaggcaggtgataatcatcaagtaatattagcagttgaaaaattaccagacaatatcgatacaaattctttccaaataatacattttgatgaagtcaaaagtgtactgaaaagtgaaacctatattgaagctctagaaaaacttgaacaaccattgcgaatattgagagctaagattttaagtgacagcttaagtcagcctttagcgacttcttaa

SEQ ID NO: 93430 - DNA, 996 bp, Novosphingobium fuchskuhlense
atgtgggggctggcgttgctcttccaacagcatgggaccaatgatgactacgcgattatctttgagtttcacgacgatgttgcattgatcaacagcgccaccaatcccactacggttcgtttctatcaggtcaagtctaaggctaccaacggaggttggacgctaacttccctgctcaagcgggagaaggtcaaaatcgaagagggagtcaaagagaagccctcatacatcgacaaaatgttcgacaatttgcacaaatttcagggcgcggtattgtcggctgactttgtttccaatcagctttgcggatttaacgctgctaaaaactctttccgcttgaacgagtgctcgtccgaagatttcaaaaagatcgtggcatctgttcaacaggcctatccgaaggctactgaagcccagatcggcctcctaggctttcagcacaccgatctcagccttggggacgtcgtctcccacacaaagggcaaactccaaacctttattgccgggcagctcggctcggtctggttcagtcccgaggccgtctatcaggcgatcgccgacgagtgtcgaaggaaggcgaatttctccggagaaatcaaatcactccagaatgttatcaaggaaaagggactaaccaaggccaatgtgcaagagtggttggatgccatccagagcaacagtcgctctccggattggagcgcgatagcgccgagcctgagctacccgtttacggaacagcttcgcatcagccaggaatatgcggtctatcgcgccgcggccttgaactcggctgatcgcgcggttcaacgaatccggatgaagatcgcagaagccctgccgtccgtcatcgacgatgcgcgcctgaccctcgtcgacatggtcgaggcactttacccacaagccgaagcagtagggaaaaagtatctgtccccgtttagtccatcaagactgaaggcgatgattatatatgaaatatacgcgcatcatcaaaactga

SEQ ID NO: 93431 - DNA, 891 bp, Novosphingobium fuchskuhlense
ttgacggagctcgacgcggatgtgaagtttacccaaaatcttgcggacgcccaggtcgtttgccctacctgcaacaccgtccatgagaacgatttcgctaaccgcttcagcctgatcagtgacgcggacgcatgtaggggcttcctcgccagtgcccggtattcgctggtcgaggttgaggcagatgtggcgcgccagatgcagtcgctacgggcgtacgatgaccggatcggacgcatcgatgccctgctggcggagaagcggggcgaggtgaagcttcgcgacatgcttcaagacgagagcgaacgcatcgttgatgcaacaatcgcggcagagcgcgctgtgatcgacggaggaatagtggaatggcagatcaaggaggatgaggctgtcaagctgatgaaggctcacagtagtgccaagcgcaaggcggagatcgtggcgttctatgccaaaaagcttagcgccttcgcggtggagcttggtgttacgttcgaagcggcggtgaagaagagcatctcaccgaagatcaatgagaccgggagctacggaccgagggctatccttgcctaccacttcgcgctgttgcacacgatccgtgaattcaccacctcctgcctgtgcccaataatcttggatacgcccctccagcaggaccaggatgaaaccaacgcggctgccatcattgcctttgcgctcaagaaccggccgcgtgacatgcagctcatcttaggcactgtctcgttgcacggcgcagaatatgatgggcacgtgatcaacccgcaggtgaaagagtcccttctgcgccaagacgagtttgagaacgttaattcctatatgcgacctttcatcaacaagcttctaggacaagatcaaggcgaacttctctag

SEQ ID NO: 93432 - DNA, 1122 bp, Marinobacter sp. P4B1
ttgaccaaaacaaaaaaggcagcaaacgcaggtgtggatgctatattgggcttcgagtttcagcgaaattgcgcactgtacttgctgcttaatgattatgaccgtttcaaggggagagagttcttcctttgcattgaacaccatgatgattttctcttctgctacagatctgattgccgggaaaaaatagaagaagtccattcttatcaggctaagaaacttacaggcgctgtctggactataaacgaacgctttgccgaagctgttgcgaagatgcttgaagttggaaacgatctaataaacgatccagctccaaaatgtcaaagctacactcatgatttgatattcatatcaaataccgatattaaattgagctataaacctagcaaagatgaaaaggaagatgggaaaaaggaaataacctacctccttaacgagcagaactttaagtgtagttttgatggtatacctgaagaaattcaaaaattgattgacaagaaagtaggaggtttctgtaaaaaggaaaagataaaatattacaagcctgaactcgataatctgcgtattgaatgggtcgacctgccacgcagaaaaaaagaccaaaaagatattttggttggacttatgtgtaggaattttccgcatgtttcagatcctaatgcagcagttgaactacttcttagcttatttagagaagttgaagctgtgtacaatcaaggtaggattattaacttacttgacagcagtaagagggttgaaggcggcgagatcaagagagcaattgatgttattgagactgaacaaaagacattcaatctatggagaagttattcaacggagttgtctcgtaaattcaaagttcctataggtatccagaacaaccatgaaaactatatcaggaatacctttgagttaatgaaggatatggcaaacagagaacatcaaataataaaaagctttgttagggagaatgattactccatggatttttatgatcatgaaggcatgttttataagtatgtatatgatataaaaaatgggaatagtataaatctaatggatgtcgacatcttcttctctgttttgtgtgcatatgtagaatgccatggtggggatatctaa

SEQ ID NO: 93433 - DNA, 1770 bp, Marinobacter sp. P4B1
atgagtgtaactattactttcaacaggctgtttgtcagctcaggttcgcataacctctgtttttttgatgaattttcctccggtgtaaatattattagtgggcgtaatacatcagggaaaagctctctacttcagagcttgttgtttgcttttggtataaatgatgttcgtgaaaatttagccgaaattcttagttacaatccgacttttagagtggacttcacaaagtctgttgatggatttaaagaagaatacataattattagggagtcgaaatccatctatataagggagccggagggaaaaatagttccttttcatggaatagatgctgataatagtgttgagcacgtcaagctaaaagactacatacgcaatttggtcggctttaccctgcttttagaacaaaaaggggagcttaagtctgcccctctagaaagtatgtttttgccatattatatttctcagtctgtaggctgggtttatttgcgtgagtcattttctaatcttcaatattacaaagggtttaaggatgattacctagattattatcttggggtaaataacagcttcgatagggtggagtatagagagcttgccaggaaaagggatcggctgacagctgatatccaaaacctcaatcgatatagcaaaaagtccgaattccagttttcaaatttagttgacgaaacctttggtgataaggcagaagagtacattgaaaactacgttaaaaagtcgagctgcttggaagaagaaaggattaaatatataaagctatgcaatgagctttcgttattacagaatcaccataaaattcttaagagaactaggggtaatgtcaagagacagaagtataatgatgttgatcgttgcccagcctgcactcaagtattaacgtattctttagagggtttgtatagtcattatcagaaatacaatgatacagttgagctagagtcacacattgctgacaagctgacaacgaaaaagtcacaaatacactcatcaaataaattgattgaaaaatttagaaaagaaattcatgaagattacggcgatcttttaagcaaaaatgtggacggagttacctttgatcaatgggtggataacaaagcaaatgttaaattgtacaagaaaatgcaaaaagacattggtgattccgaaagtgaattagacgctgttaggtcgtcaattaattctatgaatacggagcaggaaacagtctccgcaaggaaagcaaaagaaaaagattttaaaatattattttctgattatgcgtcgcagctgaagcttaatccgttagctgattctagatatcttagtctatattcaatcaattctttccctcgacaaggtgtcgagcttcataagactgttatggcctatcactttgcattgaatgctatcattgcgagaacaaaagttgcacataggttgccatttttgttggacgccattctcaaagaagatatagatgagactaatttaaagactattttatcatttgttagcaacaacctaccggaggatacccagacattcatttctatatcggagcacgtcaaaagtgatcctgagattagagacgggaaagatattaaacctatcgagaaaatcagtgttaaagacgttaaagatgcttactttcctgaaaaatcgaagctaatctatattggtggtggggaacttgaacgtagctttctttctcagtcactagaggattatcaagaattatatggtgaaactattgatttgacggccatctaa

SEQ ID NO: 93434 - DNA, 1086 bp, Klebsiella michiganensis; identical to SEQ ID NO: 92478

SEQ ID NO: 93435 - DNA, 1653 bp, Klebsiella michiganensis; identical to SEQ ID NO: 92479

SEQ ID NO: 93436 - DNA, 1089 bp, Marinobacter sp. AK21
atgcacaatactatacagtctgacctaattacagtgcctcaaaccgagactgcaggctctcgcagtccagcaaggtttgcctatcaacgaaactgggctttagcagagctgattgaataccatttggaagggaaagattatgtctttgcctttgagttccacgatgacatattgatacttgattccgaagttaacccgtcaatcctgcaatttatccaagtaaaaactaaaacaactggccaaaagtggtctgttcatcagctcacgacgtctgaaaaaggtaagaatgggtatcccgacaaattatcaataatcggtaagctttacgaaaataagaaaaatttcgctgatcatagtagccaattacgctttgtcactaatgcatatttttcattcgttgatccagtacctgtaacaattgcaagtcagttagaaaagaaagaccaagacaagataactaatgcagtccaagcacagcttggagctggcgctgttgatttaaacgccctccaactagaacaaagctctctgagtgtcgatgaccatgaaaagcatattcggggtattctacataatttctttgaggagctatttggtagcgatcataatatcgccgtgtcaccttggtatcagtccatatctgaccagattaaattaaaaaataattacccatcagcgcaagttaagtctttcgacgattttatacgtaataagtgcattacaaaatctgaaatagatgattttgtacagcgagtaaaccgctctcataatagccgtgacaactgggatatcatcaaatcccaactacaaacagaaggctttgggtttcaagaattaataaaactccagcgtagttggcaaaagtacgccactgataggctggattacgacaacaatgctctaaagaatctcgaaattgacatttctaatgcagtaagcacaacttcatttggagacagtccaacgctaaaagatgtgatttcgagcattagaaaagacctttctaaaaagctgtcaaaattggcaagcatttttgatagtcactacatagactccatcatcctgtggcaatactgtgaacagttatag

SEQ ID NO: 93437 - DNA, 1716 bp, Marinobacter sp. AK21
atggaactaaaccagctactgataaagcaactaacgatcctgtcgataccggagaagtccgcaaaaacagtgacgttccatccacaaagaaacctgataacgggcgagaatgacgtaggtaaatcttccattatcaagtccatctaccactctctcggtgctgacgttcactttgacagtgtttgggaaaaagctgacgctattagcctactgacattttcgtatagcaacaaagattacatgatcttacgttccagagatcattttgggctctttgatatacacggcaatcttctcaaatccttcgacagtattatcaaaggcctttctccttattttgcaaaattatttaataacagactgctgcttaaacagtcaaagacaaatcaaagaattcctgcttcaccggccattcaattcctaccattttatattgatcaggataagggctgggcaaagccgtgggattcttttgaaggcctcggcgtatttggcggtttcaaacgagatttaatcaatttcgttacaggtatacgcccgaatgagtacttccttctatccgaacgaatagaccaactttcggccaaattaacaatgcttaaaaatgaatcaggagttcttgtatcagccaaaaagaccgttgaaaagcatatcccaaatgccacttttgacattgatattaaagcttttaagagagacatagataggctccttgttaagctagaggtgttgaaaaataaggaaaatgaataccgaaaaaacctgattaagcaaaaaaataaagaagtatttatagataatgagattgctattgttagtaaatccattcgcgaaatcaataaagactatgagcattcgctaaatgatcttgattgcgaaataacttgccctacctgtaatgctacttatgaaaactcgatggtttccagattcggtcttttagaagacatcgacacttgccgaagccttctctctgactacttagaagaaaaaaagaaaatcacaaaggaagtcaccaagctggaaaatcagcttaacctgcaagttgccaaggtgcgcgaaatcaccgaccttcttaatgaaaagaaaggcaaagttcgcctcaaggatcttattcaaaatgaaagctccaagcaggttaaagaaatttttaaccgaagccagagcaactacagtactcaaattggtgaaatcgaagagcagaaatcaggccttgagattgaccggtctaaattgaacaacaaggagcgtaaagagtcgattatcagtaggtttaatacccttattgacctatttctaataaagctaaatgttcacaccctcaattctgattggttcagcgatatccctttatcagttaaatcccagggcagtgatactccgcgagctcttctggcttattactatgccattctttttacttccaaagagtttacatctctaccactcttcccgctggtgattgactcaccaaaccagcaggatcaggacgcaacaaacagaaataaaatcatcaagtttatttttgataacacgcctgatgactatcaactaatattgggaacagtagatttgcatggtgttgaatacgatggtcacactatatctccagcgactaagcttcagttattagataaggacgagtttgaggacggttacaataaaattgctcccctcttggaccgcctacaagctagcctaatagctgaatcgtga

SEQ ID NO: 93438 - DNA, 1149 bp, Burkholderia sp. BT03
atgaaaaccatagaaatggttgcgccgagggaagacgtggggcgcgatacgatctcgcgctttgacatgcagttccaggccgcagcgtttgcagccctcgaaatccttgagggcaatggtgtcgactgcgtgtactgcgactaccatgacgacttcgtggtccagcgtatcgtcgacggacgtacgacgtatcatttctttcaggtgaagacgaagcgcaagcccaatcatcagtgggatttgctggagatattcgcgtacaagaagcgcggccagcggacggacgcagacagcctcgcacgaatcagaagcagcttcgctggcaaactgctggtgcacggcattgttttcgatgaggcgtgtacggaagccacgctgctgtccaacgtacatttcaccgacgatgtgatcactgtcgtcgacgaattccgcggccgcacaccaaaatcgaaatgcgcagcgtttctcgccgagcatttctcggcgatttttacggtcgaaccggagcgcacgtcacagttgttgagcaagctgtcgctccgcgctgcggtgccgtatatcggagatgaccgcgaggtcttcgcgtccgcggcccgtgcagccatctacaagtacagcgaggtggatctcagttaccacgaaacgaatgagatcgcggacagcctggtcgatctgatttacagaaaatcgaaagagccgcttggtgagattcagccgcatgagttgcaggcgcgaataggggttgctcttgatgatctgctgcgtgtactaagcatttcccgtagcgtgtacgacgccttgcgcggcggtgaagcccccaaggcactcaaaaccgcctcgatcctgcagcgctggttgaaggcggctggcgcgaccgaagagatgatcgaatacgcgtcgaggagcaaagtgagctgggatggctggctgcgacgggcgcggcacatttacacgccgtttgacatgaactttctgctggaccgcattgacaagctgtatacgaagtggatgcagggcatcgcggacttcgtcacgctgcacgcgttgctgggcgaactgggcgaagaacccatctgcaggaaattcgaggggctgtcgtctgagctgttgctcggtgcagtctgttcggttggcgtacggcggcgatga

SEQ ID NO: 93439 - DNA, 627 bp, Burkholderia sp. BT03
atgcgacttctaaccctgaaactacaggcgcgtggcgtcaacggatgggaaagtccgacactggagtttggccgccggctcacatcgctttttgcaccaaacggcagcggaaagacgccgatcgtccaggcgctcgctttctgtctgggattcgacacaaagttccgcgatgatattcgggaaaaatgtgaagccgtcgtgttgacggtccagcacagagggggcgatcttacgatccgtcgcaccatcacgaccgattttcacgcgagtatcgacgccggcgatcgcaggcgcgaattctttagtgaaggcgacttgtcgcgggtcctgtttgaagagctgggtatgaccgtaccggcactcgtcggtacgaacaggcagttgactcgtccatacgtttcgacggtacttccgttgttttatgtccggcaggatggcggctataacgagccatatcgtgcgccggcgacgttcatcgccagccagttcgtggagatggtccggtttgccttcgggctcagtccaagacattcatataacgcaagacgcgaaggttgtgtcgcactaaggatggcgggacgaggcagtttcgatatggtaagaactgtttacgtaaccagtgaatag

SEQ ID NO: 93440 - DNA, 1164 bp, Herbaspirillum sp. YR522
atggcgaccatagaagccgtcgccccaggggaagatgttggtcgcgataccatttcgcggtacgacatgcagtttcaagctgcggccttcgctgcacttgaaatacttgagggcaaaggggttgattgtgtctattgcgactaccacgatgattttgtggtccgcagaaatgaagacggacgagtctcttatcacttcttccaagttaaaacgaaggagaaggagaatcatcaatatggcctcaatgagatttttggtcttacgacccaggccgtaaaggcaactcctgatcgccttgaaaaggtcaaatccagtttcgctggaaagttacttctgcacgggattgttttcagtgaaaactgtggagaggtcacgttgctttccaacgtccactttgaagatgctgtcgtcacagctgttgacgagctccgagtaaagacgccgaaatcaaaagcagccaaatttttatccacacacttcagtgcaatctttgagctgaaagatgctgatgacgtagatcacgaggaagtgcttgcaaagctgtcgttactgcctgcggtgcgtcatatcggacgcgatcgtagcgcgtttaccgatgctgcacgatctgcggtctggaagtacagcgaaatcgatctgacgtatcacgagatcaaggaagtcgccgaaggtctagtcgatctggtggggcgaaaggctcggaccaggatcgcaaatgttcgccccgaagagcttgtcgatttggttggcgtgcagttggacgatcttcttggcgccttgagtatctctcgaacagtctatgacgctctatgtgctggagaggatgagcgagcgcttaaacacgcgtcagttattcagcgctgctaccggaaaatgggagcagaagaaggcatgatcgattatgccgctcagcaaaaagtgaattgggatatatggctgcgtagtgcccgccacaatcataaagagtttgacttgaacattttgcttcatcgaattgatacgttgttcgctgagtggcaaagacgtggagcggactttcctctgatgcaggagctaattcagagttgtgtcgaggagccagccataaagcgctttagtgggctagacgaaggactcttgtttggagccatgaactcagtacttgtccgaaagcattcgcgatga

SEQ ID NO: 93441 - DNA, 1782 bp, Herbaspirillum sp. YR522
atgaggctcgtgtctctacaatttatccctaggggtatccatggttgggaaagtcctgaactagaatttgcacagcgaacgacatcgcttttcgctaaaaatggcagcggcaagacgccgctgatccaggcgattgcattctgcttaggatttgctacaacgtttcgtgaggacattcgagagcgctgctctgccattgttctaaaagttgaactgaacgggaagatactagaagctcaacgcgagttatcagcaggtgaattccatcttacgacccgtattgatggggagacccgcgacttctttgccgaaggcgagttctccaaattgttgttccaaagtttgggaatggcggagcctttactggtcgataacaaacggggggcaacgaagccgtacatatcgaccgtactaccaatcttctacgtaaagcaggatggcggctatcttgacgcatatcgggcttcagcaaatttcatccaagaccagtttgtcgagatggttcgtttcgtctttggcatggcgccaaagcgttcgtacagtgcctcaaaggatctactagaggcgaagcagcagctagaactacttcagcgccgaatcgtggctcaacagcacggggttgtggatcttgctgcccgagtcgatgattctccggctgcaacagaagcgatggcagcgcgatccgacttccttgctcttcagttgaatgatttgaaggcgtcggccgattcggctgatgctgcgagtgatgccttgaaggaactgttgaatgctaaggatgaaaagcttcgagggctaaagcgccagcgctacgaattgagtacgcgggtgacaggtattgattccattcgctccgaaattgacggagaactccaaacgttgacgctgaacgaacagtcgcgtcgtgcattcgagattttcggtgagatttgcaacaaacctgattgtggtctgttctttgttgactcggtctcttacgcaaagaaccttctatacctgcgtgaccaaataaaagatctagaagcgaatgcggtgcgtgccgagatccagttggaggaattagatcgccgcattgacgaagatgagcaggaccggcagttaattgtgacgaagttggaggcgcttccgcaaaatacagcaacggacaagttgatcgcagctgttcaagcgctgacaaaggagttgcttgagattgagcagcagcgtgcatcggtcaacgtattggtcgagttgcgccgcaagttttatcagttggagcaagagcgcgaaaagctgcaggacagaattgcatcactgagcagtaacgtgagaggggaacttgaatttttgcagttgcgcgcaaagattcgcgagtctctggtgaagtggatggatatcctgcatacgttgaatgtgtcgcatgaaatcgacatcgacgctaatttccgcttcaaatttggtacagaaccactggacgtatttacgggaagtacgcggagtcgcctggtgttggcgattcatgcggctatgtttgaggcttatctggaggggaaagagcgtcatttccgcttcctgatccttgatacgcctaaacagcacgaactagatggcgcggaccttgcaaactatctcaaagaattgcagcttgtctgcgacaaatatggtgggcagataatcatctcgtcgactgaatatcgccacccgatcggcgcaaacgatagagagtggctgccagaatatccaggaaccgaacaagctatgtatttggggaagccaggaacaaataacgaagaactggcttag

SEQ ID NO: 93442 - DNA, 1143 bp, Clostridium sp. Maddingley MBC34-26
atggcagctaaaacatcagtactttcagcttcggctggtagttctaaagtagtatcaaagaaaaataagcaaataaaagatataacgattgatactagttctggtagtatggcttataatcgctttgagatgcaagtaagccagactcttcacatggcaattgaactttttgacagcttggattacttattggtattggattattatgatgatattgctttgtttaataatgaaaagaaaccggaagtagtaagctattatcagatgaaaactaatgaagaatcgattagtattagcacagcaatttcagaagattggttagttaaaatgtatgcacagttggagcgtcctgagtggttagtaaaagaacttggacttataaccaactgtcctttaaaagtgactgttaagattaatggattcgatggtaaaaagaaaaaccaaacaaaaacatatacagctgaaaaaacatcttttagcaaatttaatcctattacaattgataaaataaagcatgatattgcacagaaaaaaggaattaaacctgaagatgttgatttgactaaatttattcacatacgaacaacactttctatttctaaacatcgtgaaattgttgagcaggagttgggcgacttcttacataaaaaatatccgcgtattacaatggacgtagttaagacaatttcaggatctatgttggacattcttacaaagaaacagcaatatgagttgctagaagagaatgcactttataatgaagtgcgtgaaaaaaaaggtattacaaagagtgatttttctcgtgtaattgaagaagcaatagtgatatccattccaccatttgatgaaatacagagagtcgcagatttatcagatgatgataaatataaagcatcatttgagtacacaaaaataatgagtgattctcagtcaaaaatagaatctttttcaaacatatttattaagattagaaaactgtgttctaattataagaagaattcggatgaatgtgtatggcaatatgtcaatagattgtgtgatggactgtacaaagataactttattatagaatcaatatataatcgtatgtatatttgcatcttaacaatctgtattttgattagtgaaatgaggcgggtataa

SEQ ID NO: 93443 - DNA, 1686 bp, Clostridium sp. Maddingley MBC34-26
atgaatgaaatgtattttaaaaatatcttaatttctgatatacaggcgagaactgctcgttttcaggagttttctaaaggattcaatgtaattactagccaggataatcatgtcggaaaatcatctctgttgaaatcactttattatacacttggaacagaggtagactatgattctgtttgggacaagagaacgaagctatatattgttacgatttgcgtgaatggtattgattacaaaattgcgagatttcaaaagagttttgcagtttttaaagaagaagaacttgtattactgactcggagtgttactcatgatttggcaaaaaaatatgaagaactattttcttttgcagtttaccttccaaataaagatacgaaaaaaatagagatggcaccaccagctttttctttcatgccgtattatatagatcaagataagggctggagcggattatataatagttttgcaagtattgatcaatataagcaaaatgacagaattaaatctttgtactaccatttaaatatctacaccaaatatactgtagagctgatggcaaaaagagatcaaataaaagatgaaattgaaaagctaaaaaaagaggaagaacgtatacgtattacgctagaagctctttcgcaagaaacacaaaatttgcttccagctgaaacattagaggatttggaacgtaacttacaaatacctaaagaacagatagcaacactggtgaaaaaagcaggtgaagttagaaacaaaattcagtctttggaaataactcttaatcaacacgagcatcagttacaggtaataaaggaatatcggaatataaagattgatgtaggcaagactgatcagaaaggattatatacctgtcctcaatgtggatatacctttgatgaagaaatttatgaaattgttcgttctaattacaatattcagaacgaggattacatgtgtcaacaagttcaactgattattgattccattgtagaagaacttgataggcataaaaaccagtatgtcgaattgatggccgacttggaagagctggagaaggtttttgatgagtcacaagatgcttacaaagtgtatgtcaggcagcgtggcttaaaagattctctaactcactttagccaacagttgagttataattcgctgaaacagtctgaatatgctgataaaataaagaagattgccaaagaactgcgaaaactgcctaataaaagggaagtggaagaaaaatatattgagtatgtacgtttaaacattattagtttggatgcatggaatgctgcttatgaaggtaatatcaaattacttaagcctatgaaggcgcaaggtaccttagagaacaaaataatactggcacagtttgttggattgtttcagacaatggaatactttaagagcagtgctattcgatttccatttgtaatagattctcctagagctaaagaagctagtaacagcagtagtaaagacattttgaaacttatttctgaagttgatatgctaccacaagttattttggcgacaatggactattcagattttgggtttgagatatcacatcaagcaagaattacaattctcactgagaaacgcaaacttttaaataaagagaattatgaaagtcataagcattttataaatcaactgcttgaactttttaagaatctatga

SEQ ID NO: 93444 - DNA, 1080 bp, Acinetobacter sp. NIPH 542
atgaaaaatttaaatatattagatgatgaagagcgcgagaataaaggcttagataccttattaagattcgaatatcaaattgattgggcaatttatcatgctttagataagttaagtcaaaagcaagaatttgtagcttttatcgaatttcatgaggatgttttatttgctaatagttgtgcatttaatccatctactagatttgaactttttcaaattaaaacgacgtataaatcttatactccagcaagccttacagcattaaaaggccctaattctactttaggaaaaatgattttaggaattaaagataaattatttgaaaaacaagtggataagttgtgtttactttgcttggaagatattaattttagtcataaaatacaagatgttgataaagattataaatttagtgaactgcatgaaaatgataaaaaaattctaaaaaatgctatctcaaatgagttaaattttacaatagattctaaatatgaagatatgattatcttccgtaaaacagcattaaatttagaacaatcagatcgtcaaataaaacataaaatacaagattttattgaaaatacctatggggatgttggtatgcgtcctcctaatatataccgagttcttgcagatgaccttcggccaaaatctcagcataaaaaacgttacgaattttgggaagattgtgttaaatatagaggtcttgctagtcaaaccatttctgagcatattgtaaaaaatacagaccaaaatgtagaaattgagcttaaagaattgattgagtcacaactcacagaaaagggcgaaaaatcaattaaaatttccagaatattaaagaaagtgcgtgaatattttttatttaaaacatgtattagttccgctgtagtacaaaatgaattagatcaattcctaagtgaaataagtttacctttagatattgatgatgaaaaaacatattgggaatctatagatttacttgataaaaaaataaatgaacatgttttattaaaagaatataataagctacaagcggtagctatatatgaagtttttaaggtgctttatgaccagttttaa

SEQ ID NO: 93445 - DNA, 1692 bp, Acinetobacter sp. NIPH 542
atgcaaaatacaaagagttatttccaatttcagagaatcgtcatgagatctctcaaagagcgcggagggaaagtacaaaaactttatctcagaactctaattgattctaaagataatacaaaaggaaaaacgactcttatcaatagtcttttttgggggttaggctgtgaagtgaaattcgaagaaacttggtgtgatgacctagaaactcttatttcattctcagtggcagataaaaattatgaaatttatagaaataatgaattcatttctattgtttctgaagatgaggataagtcttataagtatccaattaagtcaaaaaaggttgatagcgattttattgaaaagttgaatgaaattctaaactttaatgttttattaaaatatgcaaaggcgaaaaaactttctcgagtaccaccaagttactattttgcgactacttatattgagcaaatgactggctgggctaatttctggttgtgtttccagaatatgaatgcttttgataaaaacaatagaactgaattaattaaatatatatgtggtgtacttgataaaaaatactatgaaaaaaagtatagtgaaaatattattacacaagaaaaaaaagaaatagagaaaacacttgagagagaaaattgtaattttacttatttaaaaggttttgaaactgaaaaatatttaaataatgtattcagaaagtcacttactctagaaaattatgaaaaaaaactgctcacattaagaaatgaatatttagacaaagcttcaaatttatcatctctaacaaatgaaatagagttaattaatattgcaataggagagttagaacaagattacgaatatagtgttcgtaatgttgatccttttgaagttacttgcccaacttgtggagttattcatgagaatgatattgttaataagttctcaattttaaaagactcagatcttttattgaaaagaattgagcgactaattgaagaaaagaataaaactagacaagagcttcataaattatccaaacttatccaatttgaagaagaaaatataaatgagcttatggatcaaaatgatgtacaagaatacttagactattcagtcgtgcaaaaaaaaatgattcctgctattcaacgtaggatcaatcataatcaaatacttattgaggagaaaaagaatctaattacagagtctaagaatgaaaggtcattaattgaaaaagaaaatcaacaagatctagaagatgaatttgtagattattttgaaagattatgtagagaacttgaaataacacgcgggaaaaagaaaaattttacagaaattcttaaccacaccagtgggggagctaatggtattaagcatatgttagctgttcgtttaacattattacatgcgatgtgtacttatgccgagtcttctataccaccttttgttatagattctcctcgtcagcaagacattaatgattataattatggcctcgttttgaaagcctttgataaaattccagaaaatgttcaatttattgtggcagcagtaaaatcccaacccattagtgaaattcgggataaatttgaggaaatttttattgggaaaaaattattatcagaagatgagtttgatatttctagcttattaattaataaacatgaaaataaaataatttttatagatttagatattaaacagtaa

SEQ ID NO: 93446 - DNA, 1104 bp, Acinetobacter sp. ANC 3880
ttgaataagaagtctgtaaatggtggcgtagatgcacaggttggttttgattttcaacgtaattgcgcattatatttgctacttgatgattatggttcttttaaagagaaaaacttttttgtttgcattgagcatcatgatgacttcttatattgttttagatcaattgagggtgttgagaatattaatgcttatcaagtaaaaaaattatcaggaaatatctggaaaattgatacaagattttcagaaattattaataaaattttatgtgtaggcgaagatctaagaaatgatgatattttaaaaacagaggattataatcataaattaacatttatttctaatactgagtttgagttgaaaattaaacctaataaaaatgaaaaagaaaatggaaaaattgatattataactcgaattaatgaaacttatccaatttgcagatataaagatgttcataaagatattagagttaaaatagaagaaaaaatagaagaatattgtcaaaatcaagatggtaaatttaattctgttgagttggaaaatctttttattcaatgggttgattttcctaaaactccaaaagagcaaaaaagatctttaattggtctaatgaaagaaaaattcccaaacgttacagactcaaaagcggcgattgatttattaatcaatttatttaaagaggtagaagtaatttataatagccagaatttagcgaaattattagatgtttctaaaagagtagaaggcgatgttataaaaaaagctattgatgttattgagtttgagcagaagacttttgatttgtggcgtgagatatctaaggaagtaattgcaaaatttaggttttctattgcgatacgtaaaaatgcagaaattgaaatatcaactacatttgaatatcttaaagatatgaataattatgaacaccagttaattagagattatgtaagaaataacgattattcattttcttattctgactatcctgagatgtttcaaggctatattaaaaatataaagaaagttaatgacattaatttaagtgaaaaagattgtttctttgcatgtttatgttcatatgttgagtattatggcggatag

SEQ ID NO: 93447 - DNA, 1746 bp, Acinetobacter sp. ANC 3880
atgaaagcagttgtccattttaatcgtttgtttgttgcttctgagaaatttaataaatgtttcttagaagaattttcattgggtttaaatcttatagggggaagaaatacggctgggaaaagtacattattacagagtttattatatgtaataggtattaatgatgttaaacaaaatttagaagaaattttagagtatgatccaatatttagactggactttactattaataataaagaatataaagttgttagagataatctaagtatttattttgaagattataatgggaaaatttcatcatttaatggaattaactctgacaatgggattgcacatgtaaagttaaaggagtttattagttcgctactaaattttaatttaatggtagaacaaaaaggggaaataaaaaaagcatctttagaatgtgcttatttaccatactatgtatctcaatctgttggttgggtatatttaagagagtcattttcaaatcttgggttttataaagggtttaaagaaaattatttggattattatcttggtattaataataatttcaataaagaagaatatattaaattggtcgaacttgttaaagaattgggttatgaaataaaaactttgcaaaaatttactaaaaaaccagagtttattttcttttcatttatggatgaagagtttggtgaggatgcaaaagaatacttggaaaattatgttaaggatattgatgatttacaggaagagagaaataattatataaaatatagtaataaactagctttgttaaaaaatcagtataaaattttaataaaaacaaaaaataatttaaaaagacagagatataatgatctcgatcattgcccagcttgtacacaagtactttcatactctctagaaggattgtatagttactatcagaagataaatgatactaatgaactggaagagaagataaaagatgaacttaaaaaagcttattcttctgttaataacacaaagaagaggcttaatgaaaaagaaaatactattaatgaaaattataaagctttaggggataaatttcatggtgaaatatcatttaatagttgggtgaaaggaaaagctaactttcaatttcatcgacaaatagaattagacttatataaaaaaattaatgagaaagaagaatataatttaaaattaaaggatatggctactgacgagaaagtcatccaaaatcgtattggaaaggaaaaagagttcgcaaagatattcaaaaagtatcttagtgatttgaaaattaatagtttaaaccaaaatcgttatcttgacttgtataaaataaactcattcccctatcaaggtgttgagttacataaaacagttatggcatatcattttgcattcaataaagttataggggaaacaaagaatattcatagactgcctttcttattagatgggattttgaaagaagatatagatcaaacaagtttaaatgatattttctcttttattagtaaaaatttacctttagatacccagacttttatttcgattgcagaacatgtgaaagaagaaaatattgttaatagtccattaaaagcagttaatttgaaaatattaaattttcaattttttaaaggtaaagcaaagaatatttatattggtaacggaactgagcaaagagcttttttgaaaaatgatctaaataaatatagatatttatttaatgatacattaagaattattgctgaagcttag

SEQ ID NO: 93448 - DNA, 1041 bp, Oscillibacter sp. KLE 1728
atgaatatacggattagagagcaagccggaacagattctgttagaaaatttgactaccaaatggcagttgcgttagactatttattatctgaaatagatagtgataccatcatccttatagagactttagaagattttgcggtttttcgcaaccatggtaccgaatttgaagaaatagagatttaccaagtaaaaactaaaaatagcggtttatatgaaaaacgaacgttactttctgataatgtcctcgggaaaattattctaaccgatttttattttaactcaaaatctaaaacgctaaatattgtatgcaacaccccacttaaaggtgcatcaactgagactctcgataattttgtttttgaaaactcattgacccctaaagaacttactgagttaaaattaaatgtaaagacatatctaagtaaagaatccgatttcacaggttccttagaatcctattggggcaaacttatttatatcaaatcctcgttgcctttttcaggaaaagaagatcgatatagtgagacattagttggaaaaaccaacagtgttatttcccattatttaggcgatgaaaaccactcaatcaatccacaaattgtttttaatactctaagacttttgattgataaacagcggagaaataaaattactacttccgaaatagatgttgaagatgcactctctcagaagggaatccgcacatctgatgttaaagcagtaatagatcaagcggccaaatttcaacaccttaccaagaacgagatttttcaacacgcctcgcaaatatttagtcctgccgaatttttggcgattaaaagtgaataccctacctttttatcctatcgagccaatctctctgaccaagcttatcaagatgcactcaaaattcttcaagaagaatattggtccttaactgcaaaatatgactctcttgatgagattatccgaattactgctcaaaactgttgccaaaagattccctattatagccttgcaattatacaaataatggcaattgttattgtatatagttaa

SEQ ID NO: 93449 - DNA, 1677 bp, Oscillibacter sp. KLE 1728
atgagtatattttataaaagcctattgatactcgataaagggaaaaatgttgcaaggaaaatcgaatttcagccgggcattaatattgtcacctcgcatctcaatagtgtcggaaaaatatcattatctttgatgcttttgcatagttttggtgccaaagttagattcagcgataaatgggacctatccaatgtatttacaaaattgaccatacaaaaagattcaagtgaaattgagattatccggcacagggacacttatacaattattactggcgacgaaaaatattattaccctcttcaaaaaaatggttatgcagaaaaactgtatgaactgctgggcctcaccatcaaaatcaaggataaaaactccgatacatactctactgctataccctcactgtatcttcttccctatttcttatcgcaaacaaaaactgatgaggatagatcagtttttgaggatttaaatatgtatttaaagtccgatttacgtgacgctttgtactaccatgtaggtgcattagataaccattattcttccgttattcaacaactgacacagtcgcgaaaaaagcttgaagaactacgaaaatcacgtgaaaagcaaatttctgaaatagaatacttggaaagaaaattggccgaatctaaaagcgcaaagttaatagatagtgatgctgatttagacgcagatatcgctgtataccagaaatattctaagaagaagcaggattattactcattggttaagacccaatctgatataaagcataaaatcaagttgttgaacgctacattaaaagacaatttggtctataccgcaaaattattagatggggaagatattatttgtcctgtatgcaactcaaatattactgactttatttcttcagcattaaaggttggaattgcggaaagtgatataaacactgaacttgccagtctgaaggccgatttgctgaatactgatagaaaaattgcgcttgctaagcctaaattagatgaattacatcaagaaattatgttgattgagcagcaacgagaaaatgttaagattacacgtgccattattgtttggaatgaagagttgttggttgcaaagaaaaattttgctgaaatacagttgcagatagattcccttgaggcatcaataaaaggatactcagaggaaatgagaaactataacgaaaaaaagcaatcagctgataaaagttatcgatctgcatttgtcacactgctaaatgcaaccaatatcagtacagatggactcgacattagcagtttgaatttatatgattctctacatttaagtggaagcgaaattcctcgggtagcaatttcgcggttcttttccttattagaaagtaaaactgctgacagtattgttatgcctattatcttcgactttccaaatttggatatgaccgaggaaaacctaacaaaatgttttcaagtaatgtgcgaaaaaatttctgatacaaaaacttatcctcaaagctttatattctctatcaattgtgaagaacgaatatctaaggccggtgcctcattagagaaaatcaatattattgatatagagagtcttcccatggatgattccgcaaatccaaagctattatgcaaacacgattatagtgcttactcaaaagaaattagtgagatgattaattcttaa

SEQ ID NO: 93450 - DNA, 1041 bp, Oscillibacter sp. KLE 1745; identical to SEQ ID NO: 93448

SEQ ID NO: 93451 - DNA, 1677 bp, Oscillibacter sp. KLE 1745; identical to SEQ ID NO: 93449

SEQ ID NO: 93452 - DNA, 594 bp, Lachnospiraceae bacterium M18-1
ttggatagtgatgtagttttgaaagatacatattatatttatacttctatggatttgtttaatccacagaatagtttgctaggacaaactgtaaatttttttgttgaattgactggaaaagagcctataaaggtaaaagcgctatatcgtttgttagtagatacaataacactaaaatcaaattatgagttggaatgtaaagaatacaaagaagtaattgagaagaagggaatcactcgtacagagtttgataatatgattcagaaacatatagatatttcggatgctgcagttgttggtgcaaaagcactgattgatgatacatatcctttgtttagtgatagggtaaaaataaaaaacgctctaacacaaattgtgcaggatttgatattaaataaagcattacgaaaaactcaagatcaaataattcaatatatttctcagcatttggaagaatttgataaaacaattgcagaaaatgtgaaatttttggtaaagcactttggaagtttatttagtattgaatattccatatatgataaacaggcattatgcatattgatattagctaaatttcaggagggattgttatga

SEQ ID NO: 93453 - DNA, 1698 bp, Lachnospiraceae bacterium M18-1
atgaaacaattgataataaataaactatatattttttcgattaaggaaaggaaagctcggagtattccttttcagaagggaagaaacgttattacctcaagtagtattgatggaactaaaaagggaaagtctgttatattaaaaagcatttattatactttaggtgctgattgttattttgaagataaatggaacgtcaatgataagatttttatcatggatttttcggtagcaaatgtaaattattatatttttagaaatcaaaggctctttaaaatatatgaaaaacaaccttttatagagattttccaaacaataagtagacatgagttggcagagttcttaaaaaatatttttgattttgctgttgaacttcctaatagagagggaattttagaaatagcacctcctgcatataattatattttgaattatttagatcaggataaaatggatggtactaatttcacgtcgtttaagggcctgactcagtatgcagattttaaagacaaggttttatattatcactttaatgtctataataaagattattattctatagtaaagcaaattgaaaatctgagtagtgagtgtgaaaaacttgaaaaggatgtaatattgaatcaaaatatggtagcgcgtgtaaacagaaacattaataatagtgattattctgttaatatggataatttgcaaagtgaaattgagaaaagtaaagaagagtatgcgataattattgacaaattaagcagaacaaaaaaaattcttattaacctgtgtaatgaaaaagaggatttaatatcacatatgaattccttagatatctttactaagaatattaataatgatataaaaaagattgttaaccatgaatgcccttattgtcattcagttattgcggatcaaatggaattacgaatagaaaactataatacagttgaggatgcattgtttttaaaaacagaattggaagcttccttaattgaaatagaacgaaaaataaataaagaagaagatcggtatagagagcatttagagaaattacagaagtatgaagaaagaataaagataaatactcaggaagttgaagatgtattgaaatataaagggtatattgaaattagagaatctttgctcaaggaattgggagaattaacgtctaatcttaataaaaaaaagaactctttggatgacaaaaaaaagaaaaggaaagagtataatgaggcaaaaaataaagtgaataataaatattataagttaatggtggcagataaacttaggtttggattagttgagatagaagacaaaaagttagaagacataaagtctacctttgttgcagggggcagtaataagccaattgccacgattatttggtatattaatcttctaaaattgagaagagagtttaataaagaagcaatacagtttccaatagtattggatagtccgaataatgttgaaacagatgaggaaaagaagcatgaattattaaagtatctatttgaaattgtagatgatgatacacaattaattgtttcaactttgggatttacacaagatgaatttccagatataagttttagtaatgtgattgaattaaataatgaaaagtataaattgttgttagaaaatgaatttgaacaagaaaagagttttctttttcaatttatgtcgaaagcagaattacagagttga

SEQ ID NO: 93454 - DNA, 1101 bp, Lachnospiraceae bacterium M18-1
atgggtaaagttcttgaattggaacagagggaacaggcaggttctggttcatataatcgttttgagtatcaagttcactggattgtgtgtcatattataggtcaacttgaaaataacgcagaatgtattgttttttgtgagtttcatgacgatatggcagaatttataccagagaaagaagagtaccaattttatcaaattaagacgaaagaagattcttcagattggacggttgcggagttatcaaaacgagaaaaaaagaaaagtggaggatataaaaaatcctttttagggtttatatattacaattttttgaattttggagtagaatgttcacattgctacttcatttcaaataacgattatgataaagatgttcgtctttggcagtcatatattgaagatggaaaaatagttgcggtcgaaaataatgaactctatcaaaggattaaaggaagaattaaggacgaatatgtagattcattaccatctaattttgatagtgtatttgatatatttattcaaaatacttttgtacataaatctaaattacaattatcaacatatacgacgcaaacagcaggtatgttttttgaccagttagcaaataaaaatataccaacagatacggcgcatcttatttttcaacagctggtaaatgacgtgagaaaaaagagtacagaacaaataaaaacgcctattagcttcaaaagtttagtggataagaaaggaatagaaatttcaaaaataaatgataaaatcaattcaacaattagcaaaaagggaaattatacagatttttataagtatttatcaacgcaaggattaacggataaggaattgcattgtattgaatctgcaaaaacattacatgattcaaggtggcttaatgtgaatgattttaagtaccaagaaattgtcattacattacgaaaggttatttctacatatattgaatgtatgggggatttttatgatgcaagtgttttagagaaagaatgtatgcatgagttgttaaaacaagggctttcgtcgcaatcattagatagaacattaatagaggtgttgtattatgagcaaagattcagcaaagaaatttga

SEQ ID NO: 93455 - DNA, 1749 bp, Lachnospiraceae bacterium M18-1
atgaaaaggctgataataaaaaaactggttgtaatcagtcagagtgagtcacgttcattagaagttcctttttcaaaaggattgaatattattttaggtgggaataagactggaaaatcttcaatcatcaaaagcattttttatacttttgggtgtgaacttaaaagaatagaaaaggattggaaagagcttatatcttcatatttaatcttttttcaatatgggaaaaatcaatatgtcataatacggcaaggtaaaaaatttcaaatttttgagcagtcgaaaggcgaatatttatgtataattgaatcagatgaatttcataaatatagcaattccttaatggatatttttggagttaaaatgccgtgtatttcaaaagaggggaaagagtttaatataacaccccctttactttttaggttccaatatatcgaccaggatgaagggtggaacaaaatagctgacgcttttgataaagtgggatatattaaagattggaaaaagaatacaaataaatatgtttgtggttatcttgatgataagtattattctcttcaaacccaaaaagcgcaacatataatggagagagaggaaaagaaaaaggaattaaatcacaatcagaactttgttgaacagatttctaattctttgtcacaattggataattcaaagtctattgaggaagcaactagagaaattgagaatctagtacaacaagcagatgctttacgaaaagatattttttctataaaagcggaaatgacaatctatgaaaatgagacgtatatgaatcaacataaattgcatattgttgaacaaaatcttattgaaacagaaaaagatatagaatttgcaatgaaacaagaaaatgaattagtttgtccaacctgcggcgctgtttattctaatggattaacggagcaaatgaatataagttctgattatgctcattgtgaaaaattaaaaaaggagctaacagaagcattagatgtgactgaaaatactttatctgatttggcacaaaagtatgagcagattagtaggcaattggagtcgcttgaattaaaaatacaaaaatcacaagagtttatatcatattcttcatactacaaaaataaaggtcaatatgaaatgtatgaggcgtgtgggcaacagttggacatccttgagaaacaagtggataaaatttcatttaaaattgcaaagttagatgatgaaattaatgaaatgaaatctaaaaaaaggtcaaaagaaattaaggataagattgaaggaaattgccgtatattggcagataaaatcaatgtaccaaagacattcataaaattacgagattttgtgcaagtaattgaccacactggtagtgaaacacctcgaatagtttatatgtatcaatcagcattatatttatataatcttgaaagaacagacagtccttttaacttttatataattgatactccaaatcagcagggacaggatacagataatttagaaagtatatttaagtctttgaaattaattatgtcagacgatgggcaagttatagttggtacggaacgtgaaacgggtatagaggataaagctaataatgtgattagattaagagaaaaacgtagatgtttatcttctgaaaaatacaatgaacacattgaattgtttcaaaaattacagaaattagctttaaattgggttgcagaaaatcataagaaacaaaaagaagttgcggacgagatgattgagtaa

SEQ ID NO: 93456 - DNA, 1098 bp, Edwardsiella piscicida
atggaaagcgaaattgaaatggataacccacttgcatcacctcagcgagagtccgctggtgctgattcatatgaccgttttgaataccaatatcattgggctctatgtcaggctttttcagcgtacaaaaatgctagagacttcgctgtattcatggaatatcatgaagatgtaatcattgccgactctcttgataaagaaaaagttaagtttacgtttaatcaagtgaaagctaactcttcaggtagctatacgattaatagtttgactaagcgagataaagggaaaaatggcgaaaaaccctctcttttaggaaaactatgttcttccgttcataaaaaatgttatttgagtaaggtgactgaattaaatttcgtgagcacaataggtttcaatttttctcctaaagatgggttaaagttgagagctttaggtctttctgaactgaactcaggtgatttatcattaattacaaacaacctaaataaagagattgatgagtttgatgccttcccaaaagaaataattagatttgtttactctgatataccacttcaaagttattatgagcacacaataacaagaattactgatagtgtcgaagtcgtattccctaaacatttattaaaaccaaaagacatttatagggttttaatggatgcacttagaatccgaggcaaagacacttttgattatgataaatgggatgaagtgcttgttaaaaaggcattaacctttgatgacatacataaagtagtgacaaacggtatatctggagaaaattcaggggtagatcttgaaaccgctaaatatgtcattaatgacttaactattaatggcttagaaaagggtaggctattaaaagaggttaaggcttatactttacgtgttttatctccttcactagcaatgctggaagctcaaaagagtatccaggaggttattgttaaaaaccgaaaccaaataggcgacaacataacgtacgattttcttcagagactcagcgctgaaattccagagagaacaaaatatatattagatacagaaagaacattgattgcagcaattatatacgaaattatttcgagtgaaatataa

SEQ ID NO: 93457 - DNA, 390 bp, Edwardsiella piscicida
atgagaaagttagttttagagaaaataacaataatatctcattcaacaaaatccgcgaggcaattcgagttcggaaggaacctgactctaataacagctgatgatggtaatagtgtcggaaaatcgacgttagctaaaatgattttctggtcatttggctgcgaacctttattttctagtgtttggaaggaacttgattgctcatccattatcaattttagtattgatggtgaatcaatttctattcaccgttataaaaatgaaatgagctttcgcaaacctggccagctattgaaggtttataataagatcactggtgcctttgccgagttattcgcagagttagtgaaatttgatgtgctattacctaaaaaaacagttttaatttag

SEQ ID NO: 93458 - DNA, 1029 bp, Tissierellia bacterium S7-1-4
atgagcttagaagaatattatatggcattgcctaaagatttatctggtagtataacaaaaaataggtttaggttggaattattatggggtgttagtaaaattattgatgcccataaagaaagagaagattattcggtaatatttgattttaaatgtgatattgaattacacaaagaacaagagatgtttttctatcaaataaaaacaagaaaatctggaaattttaatgaaaataatttgtgtaaaataaataataaagaaaataattctattttaggtaagttatatgctctttactctcctaatcaaaatataaaattggctatagtgtgtaataaaccacttaaaataagaacaaaagatattgattttcacgaaaaatgttttggcgaaattgataaagatgcaattgatgaaataaaaaataaattgcgtatagagttaaacatagattcagtaaatgtagataatgtgttttatatattcgatgagatggattttcaacaccctgaagatgcaattaaaggtaaattaataagttcttttgaagaaataaaaaacgaagagccacaaaatccgaatgcactttatagattggttatggacacggtaaaacagaaagcggcatacgagttagatgtaaaggattatgaagaagtaaaaaagaaaaagggtattactcgaactgagtttgatagaatgttagattctcataaaaaagaatcgaaaaatgggattaatgaaacacaaaattttatcaatacattgtctttaaaaagacaaagaaaatataatattgcattaagtgatttgctagaaattcaaaatactgagagcttgcgtttaataagagtacaaattttcaactatattcgcgaaaatgaagattcatttattgatgaagaagattatttgaataaaatatctagagtctttaataacgattttaatattgaaataacaaatgatatgaaagacgtgcaatatttaatagtttattttatttacgcgactggaggggaaatataa

SEQ ID NO: 93459 - DNA, 1683 bp, Tissierellia bacterium S7-1-4
atggttttaacttttgatcaaatatacatatttgatataaataaagaagaggcatatacacaaactttttacaaaggattaaatatcattacttccagtgaagttgacggaactgacagaggaaagtctttgttacttagaagtttatatcattctttaggagctgaagcgaactttgatccaaaatggaatgaaaaagatatagtatatatccttaaatttagtgtagatgataaaaagtattcaatttatagatctaaaagattgtttaaaatatttgatgatgaaaatcaattgattttcaagacaattcacagatctgaattagcaaaatttatgggggaattatttggctttactatttttttaccaaataaaaatacaaaacaattagaagttgcacctcccgcatatagtttcattctaaattatttggatcaagataaatacgaaggaactaaatttagttcttttaataatcttgctcaatatagtaattttaaaataaatgtaatatatacgcacttaggtatatataataaagattactttgaactaattaagcaaaaggaagaaatagaaagtaaaattaaaaccactaaagaggagatacaggaattagacaagttaaagaatagaactctagcaatgcttaagggattttcttgtccagaaactagtaatgctctagaaaatgaattaaaaatagaatcaaaagagtattcattattaatgaataaaatgagtgaaattagaaataaacttgtggaattaagaaatcaattagaggaacaaaaaattgccttgaatcagattgataaatttgcaaaaaaacaagaaaaagaaattaaaaatattttattaacacatatatgtccagagtgccacactattttaaatgatactataaatataaggagcaagagatataacaatgttgataacgcgatagaattaaaagatacaattaatgtagaaagcattaaaatcaaagaagaaattgaaaaatatgaaaaagagtattctgacttggcagttcatttgaaagaacataatgaaaaaatatctagtagtagaaaggaaatcaataactatatcaaatttaaaggactaaatgacttaatagataaaataaatgaggatctattatttaataagggcatgctcttgcaagcacaagatgatataaaacctataaaaaaagaaataaaagaaattagtcaaaggattaaatctgttgacgaagattattattgtttaatcgataaattgaaaaatagatttaatttaaatgaattagatgatacaatctatcaaaatttatctaaaaatttttgtgctagtggaagtaacaagcctttatccactgttatatggtatttaacacttaatgatttaaaacaaaagtataattctaaagaaattgaatttccaatggtgtttgatagtccaaataatgttgaaactgatcaagagaaaaagatggctttaattaaatttattttagaatcttcaaataaattcaatcagatgataatatcatctatagggttttctaaaaatgaatatgaaatagattccgaagttcatattaagattttagacaatgataaatatcatctgttaaatgagcctgactacattcaaaactatgaaattttaaaatatatgaatgatgcataa

SEQ ID NO: 93460 - DNA, 1086 bp, Clostridiales bacterium oral taxon 876 str. F0540
atggatctatatacacgtattcttaatactcctcaaagggagaatgctggagcattagcaggtaacaggtttcagtatcagtatcattgggctttattaaagttactaaaactatttgagacccaagaagactttgttttacttttagaattctgtgaagatattattgtattagattcttctgatgatccaaaggaaatagatttttatcaaataaaaactaatgctaaagctaattctttttactggaacttgtctgattttaccaatgccggtacatctaaaaaacctaaacaaagttttgctcaaaagttaattgataatttcataagatatgaaggtaatataaaacagatacattttgtttcaaataagcatttcaaatttaaagaagttaataccctaagtagtaatgtagtttctttagagtctttaacagatgatgaatttaagaaaattcaggagaatatttgtagtaactgtaagcaaggtaattgtaataatgaatgtaaaaaactaatagtatttaatgtatctgaattatcattagaaaattttaggcaaacgtgcctaggaatactatatgagtttttagacaagcattgcaattcgaaatctataaaacataaagctatttatgagactttaattagtgagatagagagaaaaagcaatttagaaaagatacctgataaaaaggaagaacttataaaattgaaaagcatcacaagacaacaatttttgcaacaacttatgcttatagataggaatagtcaaatgtattatgagtggaatattatacatacagacattgcacagcattttaatatgattgaaacagcaaagattaaaaaagcttttgaaaagcttattgtagatgtgttaaatcctgataatttaatattacatgatataatttcatttgttcagttaaaactcagtaatattgaagatagtctaaatgataatgttaaaaagtttatacatgaagtggtagtagacaccagaagtacaaaaaaagttagtacaaacatctacgatgattactatcttatagcgattattttaagggagttaaagaaatga

SEQ ID NO: 93461 - DNA, 1743 bp, Clostridiales bacterium oral taxon 876 str. F0540
atgaaaaaagtactattaaaatcattaagtgtgatatcaccaaagctgaaacaagcaaagacaattaaatttgatgatagattgacaataattacaagtgaagatcaaaatggatcttctatcaatcatacaggaaaatcattaatgattaagtcactttactatgccttaggtgcaggattaagtaaatacacaaggaattggagagaacttaatattgtaacgataattaaatttgtttatagtgatgtaatgtacactatgtttagatgtggtaactcatttgtaatagtaaataagaatacagatgttgttcataaatttatgagtgtttctcagttaaaggaattttatgtaaatttatttgattatagattaaagttgctattaaaaaaggctgatgatgaaaaaacagaattgcatagtccttacccaagttcgttattcttgcctttttatatagatcaagatgtaggctgggatggtacatggaaatcattttcagatctttcaatgtataaggattacaggaatgagatatttgcatttcatacaggacttagaaataatgagtattatgatttgcttgtaagtaaaatagaaaaagaaaaattagttatatctaatagtcaaataactacaaaatatcaaattactttagaagaaaacttaagaagatataaggatgttcttgacttaaatatagaacctgaaagcttcaaaaatgaattagatgctttaataaaattattaaataatttccaagaacaaaaagaacaatatagggatattttgttggataaatataataaaaaattagaagtattaagttctttggaaaatgtgaaaattgtaataggtgaactagaaaaagatgttaattttataaataaaaatattcatgatgaagtaatatattgtcctacctgtggagttaaacatcaaaatacgatgtctacaaagtatatgctatatttagatatagaagaatgtcaagataaaatagctcaatataatgcaatacttaataaattagaaaaagaaataaatgatatagaagataacatgcagcagttgagcaaaaaagctcagagaataagtgaaatattaaataaaaaaagagatgcaattcaattaagagatgtattagtagctcatggaattaaagaatatattacagatttaacacaagacataagaaagttaagtgaagaaattgataaagaaaatgaacgaataagtaaattgaagacaaagataagacaaatagagaacagttcaaagattatcaaggagtcttttaattcttatattaatacttatataactaaattaggaattagcgatataagtattgatgaaataaaaaatattggggaaattgtaaagagcggaggaagtgatttatcaagggctatattaggttatatatttgcttattttaagttgatagaagcaaataaagatgctattatttttccgatagttatagatacacctttacaacaagagcaatcaactgaaagtacagataatatatttgatttattattagataatcaaccggaaaatgcacaattaattattgcaactacaagtacacatggcaaaaaagttaatggagttaaatatgaatttctcataaagcaaggtgtactaaatgataatgattatatagagtgtgaaaaagaatatttgcattacttggcaatcttagctgaggctgataatgataaatcttga

SEQ ID NO: 93462 - DNA, 1488 bp, Burkholderia sp. AU4i
gtgatcgccagtgccatcaaggtagcctgtcggctcacggcaccgcgatgcacctacccgaaagagttcagtacgctgcgtgacttctggctcgccagctgtagcaatgggctggatgctgtatatttatacagtatgagattcctcttcaaaatgagccacagccgcgattggaaccacgccaggggaggtcgcggtgccaccgttttcacaagcacttcgtgccacatttcccattggaccgctcaaacgtatcgtgggcgtggacgcgcaaatgtgatacaaagcgtgcatgcgaaattcgggggcaaagcgaaacgcatggacgtcatccatgacaaaaaaccgcgcgagacagttggtcgcaacaccgttgcaaggttccgtatgcagtttcaagcagctgcttatgcggcgcttgagatcctgagcggcaaggagatcgaccgagtctactgcgattatcacgacgattttgtcgtgcgcagaaccgtagccggcgtggtcgactatcacttcttccaagtgaaaaccaagggtaaggcaaaccagcaatgggatgtcgcggaggtgttctctctcaagaagacaggggcgctggatacagaagagaagttggaggcgatccgcaatagcatcgcgggcaagctgttcgtgcacactgtcgaatttggcgaccagtgtcgtgaaatcacggttctcagcaacgttcacttcaacgacgatgttcatgatgtcgtcacggacctgtccgctggtacgtcgagcaagaagtacatccgtcagctcatcgaaaaatttgctgaaattgtttcgcctgagaccccgctgtcacccgagcaaattgatgcggctcgaaagaagttctccttgctgccgaacgttcagtacatcggcgacacgctcgaagcgttcagcattgccgcgcacaacgctatctggaggcacagcgagattgagctgcatcaacacgaggttgagcgcctcgcaagaagcttggtgacgcttgtcgaggaaaagtcgtgttctcccatcagcgggctatccaaggcagacatcgatctagcaactggcgtcggcctagaagacctacttgatgtcttgagcatttccacccaggtgtaccagaccctgcagcaagggggcgaccccgctgccatcaaagtggcgtctattcttcagcggaagctgaaggaggcgggtgccactgaatccatgatagaggcggcgtcgcgcgcgaaggttgcctgggacgtctgggttagaactgcgcggcatacattcccggatttaacgttcaacgttttgctcgatgaagtcgacaagaagtgcaaggcatggctgcttggaggaggcgtcttgggagaccttgaggacttcgttcaagcaacgcttgactctcccattgcgaagaagttcgcggcactagatgcggacctgatgttcggagccttttgtgcggccgtcgtttggagatctacgcgatga

SEQ ID NO: 93463 - DNA, 1791 bp, Burkholderia sp. AU4i
ttgaggctgaagtcactgcagatcgaatctctaggcgacgtgggttgggaaagcccgctcctggagtttggctacaggaccacgatgctgttcgcgcgcaacggcagtgggaagacccctgtcgtccgtgcgcttgcgtccgcgctggggttccccaacagctttcggacagacatcctcgagaaatgcaacgcgattgtcttgcgcgccgagtcggaagggaaaccgctcacgatccgccgcaccatcgacgcgacgaacgaggggttttacgccacgattgatttcaatggcgagcaaactgaacaccattcacagggttccttctcactcgcactgtttcggcttcttgggctgacgccgccacggctggtgtcgacaacgggcgaggaggcgcagccctacatcgcaaccctattgccgctgttctacctcattcaaggctacggatattcagctgcctaccgtgccccaagaacgttcatcgcagaccaatttgcggagatggtgcggttcgccttcggactgaacccaaagcactcctatgaggtcaagaagacccttatcgaagagaggagtgcgcttgaggcacagacacgtaagatcgttgccgcgcagcgtgtgcttgagtaccagagtcgcggcgtggacgatagtgatgcaaaccaatctgtgctgcagcggacggctgaaagcctgacgcagcagatcgacggactgcgtgcgtccgtggacgcgaggggaagcgcgaactcgacgctcactgaactcctgcgtcagaaggacatccaaatccgagctcggcaactagagctcttcgaactacaaaatcgtgtcgctggcatcgagacgatccgtgcggaaattgatggcgaggtcgagaccctcgcgctgaacgaagaggcccggcgtgtcttcacgtcgtttcaggaaatctgccgcacgccgaactgcgggttgtttctcgggagcacagaatcgtacgggaagaacctgctgtatctcaaggaccaaatcaaggacctggagcggaacagccagcgtgccgagattcgggttgagcaattggaggagaggcttcaggagctaggcgcggagcgccagacgctcgttgacaaccttgaggcgcccaatacctcggacttcgaccaattggtgacagctgtgcaggccttgaccaagcaacttgtcggcgtgcagggcgaattgggccgaatctctgggttgaaggaagagcgctcaaagctattcaagctggagcgcgaacgcgatcgtatccaggatcgcattgacgggttgtccaacaccggtagagcagactatgagttcaacaagcttcgattgaccctacgcgaactcaccgtgaagtggatgcagacgcttgacacgcaaaacgtgtcgacgaacgtcgacattgacttgaatctccgttttacgttcggaggtgaaacacttgatgtcatcggcagcggcggtagcagcagcacgacgatcagactagtcctggccatacacgcggctctgctggaggcgtatctgtctgataaatctcgcccattccgcttcctgatcctcgacactcccaagcaggaggagctgcatactgctgacctagcacgctacctaacggagctcgagaagatgtgcgaggcaaacgatgcccagcttatcttttcgtcaaccgagtatgatcatccaaccggtccgaaggacaagcgttggctaccgtgctaccgcggaccggacaagccgatgtacctcggcaagcgaagcgatctgctatccaagtaa

SEQ ID NO: 93464 - DNA, 951 bp, Methyloceanibacter caenitepidi
atggaacaggcggactatctcgttgcgttcgagttccatgatgatgtggtttttctggagccaagcagcaagccaacggcggcggatttcgcgcaggtcaaaacttcatcgtccgcaaagcctcgcaagatttccagtctggtcgcccgcaagaagctaaaggacgagtctcaagcaaactccatacttggaaagatgtgctgcaattttgagggcgtctgctcggaatatgacgtgcggattctgctggtctcaaatgtcgcgtttgagttcgccgacaaggatgtttgcgcgaaggatatcgaggaaaaatacaggacgaagattcggaataagctgaaaaccgagataccaagcctgactgacgaacaattcgagcgtctccattttttgatctccggcgtctccatcgacaagatgcaaacctatctgacagggcaggccatggaactgttcaagacgcattttggtgaagagcatggcctcaacgtccacagttgggtgcggcttatccaaggcgacattgcgcgaaagaacaatctcccctccgatgagataaagacggtggacgacctgatttccaagaagtgcattggcaggtcgtacgtcacagatagcttggcggttgttgcgaaagccaagcacacgatcgacacggcccttgtgaacacccagttgggcgctgccggatggactgcggccgatcttgtgcgactcagcaaggcttttcccgatgcaacgtacgactacacagacggatcgaacgctgtggcgcgcggcatcgtctccaaactagaggcgctttttgaagctatgaacaacggtgatatcgaactcgcagccttttgcgagaagtcgctgagcgcaatcggagcagcgctggagcatccctataacaagaagccgtacctcacggcgctcgctattctggtgttctatgaaaaaatctaa

SEQ ID NO: 93465 - DNA, 1701 bp, Methyloceanibacter caenitepidi
ttgatcctctcaaagaccgagaagaaggcacggaagatcgagttctctccggcgacaaacctgctgaccggcgagaatgatgttggcaagtccacccttatcaaaatcctctacaacacgcttggtgcggacgtgccgcagcttaacaacacccggtggaagagggccaaggctgtatgttgtgtgaaattcgcgcttggcggtaaagactactacatcattcgtgatgagaagttttttggcgtcttcgatgcgaacagagagctgataagtcgccatgtagggctatcgggcgagcgaggcattgcgcatttcctgaaccccctgctgaagttcagaattgaactggagcgcaaggaggactcgaagctcggtttagctggaccgtcattctattacctgccgttctacatcgatcaggacaacggctggaccgccagttgggcttccttcaatggcctccagcagtttacgcgttaccgcaccaatatgctcgaatatcatctaggcgtgcgtccacagcgttactatgacgccaagcgcaagtccgttgagatcgaagacgaactgcacgacctgggttcgcggaaggatgctctccttgccgtccgcgattcctatcacaagcgcaaagctgcccgtcaggttgatcttgatccggccgtattccgtaaggaaatcgagcagctagttgatgagtacaatgcgatctacggacggcagcaggacgtgctgcataaactcaagcaagtgcgaaacgagcgttacggtctggaaagcgaaatatcgattctgcgccgggcgatcaaagagcttgaaggcgattacgcatatgccgaagatcccaagacacccaacccggttggttgtccaacctgcggtacggagatcgaaaattcaatcgtcgagcgttttggaattctcgatgatatcgacaattgctatgcgctgatcgaccagcgccggaagaagcttgtcgatgtgcaagccaacgaacagactgtcgacgccgcgtatagagaagtcagatcggagttatcgtcagtggatcagctacttcggcgtcaacgagagaatgtgacctttgccgagtttgtgacggccgaggggataaaggaagtcatgtcatcgctcagcgaggacatcaacgtgctttctgagcaggaatccgatcgccaggcctcgctcgacgccttgaaagacgatttgaaggttgattcgaaacacaagaaggcaatcaacgaacattatcaggcgcggatgaaggaattcctcgcagcgcttaacgtgcatgttctggagctatcggactacaagtcctatgacagacagataaaggccaatgcgcttggcagcgatcttccgcgctcgcttctcgcgcagtgtatggccttcctgcacacgatggagaagtttaatcatttcaccttgtgcccgctcattatcgactcgcctcttcagcaggatcaggacaaggacaacgctgaaacgatatttcgctttatcttctcccgaacccttccggggcagcagctcattctcggtacggttgcgcttcccggcgttccggatgacgcaatccctggcgacactcgcaacattgagctgactgggaagtacggcctgctcatcgacagcgactatgcaacagtgtcaagcgagattggtgagatgcatgagattactctggggtcggactaa

SEQ ID NO: 93466 - DNA, 1170 bp, Methyloglobulus morosus KoM1
ttgactctactaccagtaggcggcaataatgacatcgaactcttggaggaggcaatattgaacgcagcgcattacacttcccaaagcaatccgctggcttcaccgcaacgcgagacagttggtgcaaagacattcgaaaagtacgagtaccagtaccattgggcgctatgccggattcttggtgctcatgaactttcgaatgactatgtggtgtttattgaacttcacgaagatgtcgtcttggcaacctcgtctgacgtaaccctcgccgaattcgagttcaaccaagtaaagaacgtcagcgagtcgccttggaattcgaagaaactgactttaaggccgaagggaagcgcaaaaaaagaaaagaattcgatccttgggaaaatgctgctgggtgttcgcaacaagccgtttattgataaactcaacgcaataaatcttgtcgccacatgtggattcaacctaccgcctaaaacagaaggtttaaagctttcaataatttccattggtgaaatccacgatgaatgtataaatgatattcaatcagcaatcgacaaagagattgggctctacccactgccaaagacattaagattcatcgtcccagacttgcccagcacagggtttcaggatgccgccattggacgcatatcaaaactcgtcgaactctcagcgccgggagcaaagtgcagcgcacaatccatttatcgggttctgatagatgatctccatcgcaaggggagtgtggcgtttgattatacccagtggagcaaccttgtgaaaaataagggaatgacatataaagatgtggagcaggtaatttctgcctatacggaaaacaagggtatcgacagcttcagttctgatttcaacagtattactgaagaaatgggtctgaagttcaataagaaagttggcctaaggagagcgtttgagcgataccacaatgcagttcgcctggagcgctcactaatcgccatcgaccaccagcaagcagtaaaaatggctgttgagaataatttttccgtgtttcatgaacacggtgctgtatccctgattgagacggcactggaagcgctacctgaaaacatgaagaaaaacttcattgacttggaatcagcacaagccgcaattatttacgagttaatttccaagtgccatgaaaaataa

SEQ ID NO: 93467 - DNA, 1737 bp, Methyloglobulus morosus KoM1
atgccaaacttagtattcaaacgtctaacgatagcgtccgatacactaaagtcggcaaatcaatacaacttcaaaccacgattcaatttaataacagggaacgacaatagtattggtaagtcgacacttgctaaactattgttctggactctaggcggcgaccctagccttgattttacttggcagtctttcaatattcgtaccttagttgatttcagcatcggaaatgctgtataccaagttggcaggtatggcaatatgatgtttctcagacgccctgatggtgactgggaaagatttcaaaaaataactggggaatattccagggcttttgctgaaattgcagaatttggtgcgctattaccaaacagaaaagacgtcaccaaattagaaaccccgcctcctgcctactattttcttcctttttacgtagatcagcagcgtagttggtcgcaggcctggaacagtttccccaatcttgaacaatacgcaagatggcagaaaaccattattcggtaccacaccggttatctgctgcctgagttcttttctatcgaggaaaagattgctcaaagcacccttgagaaaaaaactgcagaggctgaggttaagaagattgaaactgccatcgaggtagtcaaagcttatattccgacgaacgagaaaactgtcgcactaacaagcagcgagtttgatgtgctctctgctgaagtcaatatcgacatatcgaagctacaatctaagcaagaagaactgttgaggacgatcgctgaaattcaaactgagcggatctatctccagggacaacttgatcttgcaaaactagcctctgccgaactcgaaaaggactactcattctcagtggagtgcgtagtcggtgaaatacttgtttgtcctctgtgcgggacggttcacgacaactcctctcctaacagagcctctatccttgccgacaaggatgaggcagacaatcaagtgcaaatgctctcaacgaagacatccgggctagaaaagaaatatatccagagccaggagcgcttgacagcgatacgctctgaaattgacaccatcaacagcaaatacaagcgggatgaaatttcctccgaagtagaggcagaacccaaaaatgatacgctctcatttttggatggtcttgcatcccgctctgttcaaaagcatgtgcaacggacaatggagactaagacggctcttattcgcaatatcaaccgtacaaatagtgcgttgagagacgatcaaaaaaagttactgaccaaaaaagagcgagaagacatggacgctgccttcaaggacaatttggcaaaatatatcaatgacttgaaagcgaaaggggtaaatctatcgcccattgagtcatcgctagattacaaaaaactttatggcagtggtggagctgctgaaagcacacggggcatattggcttattacatggcagttcttctccaaattcatgctgcaaagaacgaagttttttcagctgtgataatcgatacgccaaatcagcaggaacaagcagactttaactacgaaaaaattcttcaatttctcatgaatacaataccttccgactctcagcttattttgtgcgcgatgaaccgaaaggaaattgatgcttacaaaaagttagcattcgtaattgaattggataccgaaaagattctggatctaacgaaatacaacgagttcaggccaatacttaactttgatgactcagtctga

SEQ ID NO: 93468 - DNA, 1092 bp, Flavobacterium sp. AED
atggcaaaaggaaaaatagatagtaattcaggggttcaagccaatgttggttttgactttcaaagaaacacctgcatttatgtttttcttgaaaaatataatagtttaaaaaaccaagagtattttattatgctcgaacattatgatgatattgtttttggttttctaaattctacgggagaactttctgaaatcacaacatatcaagcaaaaaaatcaggaactatttggactacgaattctgtttatgaaataatcgataaaattactaaatctgggattgaaataattaaagatagttttcctaaaactaaagattacagtcaatcacaatactttataacaaataatacaatttcgcttgattataaatgtttatctgaaaataaaactaaaaaatttttagtaaatgaaacaacagaaactgtttcctatttaaatttagtaaatgattgccaaaatgtattgaaaaaaggaaatccaaaaattacttttgacaaaaatcaagttttgcatttcgacaatttaaatttcacgtttattgatttaggaagaaatacaaaatcccaactagaattacttactggaaaatttaaaacagtatttggaaacaaaataattgatcatacagctgctagagatacattaatttttcatttaaaaaaaatagaaagtacatacaatcaaggtgatattccgaaattaagtgataaacataaaaaaattgagtcttccgaaattgaaaaaattctaaacatcctaacaacaaaaaagttagctttagatttttgcagaaaaagagctgataaaatatgtgatgaactttcaataaatgtctttgatgcaatgtcatttgaacttgattttgaaaatagtttagatgaatttaaagacttaaaacaaggagaacaccaaaaaataattcgatttatagaaagtaaaaaaagtatttttacaacgtttactagtgacgtactttgtataaaggaattgtataatatttttttaaaagaacacaattcaactttaaaccaacttcagcttaaagcatccatttctgcgggctactttctaatacttatgcaaaaatga

SEQ ID NO: 93469 - DNA, 1734 bp, Flavobacterium sp. AED
atgaaaacatatttaaacataaataaaatttttattcatagtgaagttaataacaaaagttttcttgccgaatttggcaaaaagctaaatgtaatatatggagctaatacagctggtaaaagtactttaattcaattaatattattcacttttggcattaacgataataaaactaaactcataaaaatattatcagaaaatatcttcacaagacttgatataactattaaaaaaaataacgaaaatattgaatatacatttgttagaaaagatgaaactttattcatcaaagattcaaaaacaaataaagttacaacatataacggaataggcggaaatagttctgtagaacattataaacttaaagaattctttaatagtttgctaaactttgatttactacttgaaactaaaaatggaatatcaaaagcaccaattgaaacaatatttttaccgtattatgtttcacaagatgttggttgggtttatttaagaaaatcttttagtaatttagatttctacaaaaactttaaggaagattttttagattattatttaggtattaccaaacttgaagataaagaaaaaagaaaagcgttagaaattcaattagcagataaaaatcaaaaatataatttctatttaaacttcgaaaaaaatgatactgttattgaaagttcaaaattacttgatgattcttttaaaggcaaaggacaagaatttattaatgagctaaccaatagaaaggcaagtttgttagaacttgagaacaaatatgtaaagcaatcaaaccaattaacttataacagccaaagattatcagtaatttcaaaagtttctagaaatcacaatcatcaattcccaggtaaagacaactgtccaatttgtcaacaaatattacctattgatacaaagcagatttatgaatactatcaggaagaaaatgatacaataaaaattaaagaaaaaattcaatctgaaaataaaaaaattcaatctgaactaaattctacaaataagaaaatagaagaattaagaagtttgttagcaaaagattatcataaacatattgtctattcagacaaaaatattactcttgatgaatggataaagactcaagctaatattaaattagatacgtcaataaatgaaaatattggaaaattagcaaaagaaatcaatgacttaaaagaagaattacaatcctttaaagacgacgatgacattcaaagcgaaagatttattaagaataaaaaattcaaagaattttataatataaacaatataaaacttgatgttcctaaaactgaagacagcagatttaactatgtttatgaattatcaagttttccatttcaaggtgtagaattacatttagctgtattaagctatcattttgcattcaacaaagttataaatgaaacagaaaacattcatagacttccattgattttagatagtatttttaaagaagatttagatgggaataacaaggaaaaaattttagattttatctgtaaaaatcgtccaaatgatactcaaacaataatttcagttgctgacaataaatccaaagacacaaaaattgaatttttcaaagaaaaatttttcaaaacggatacaaacttaatttgcattggtaattctatagacaaagaatcaatattaaaagaacacgataaatcattaaacgaaatattaaatgatacttttgaaataatggagtatctataa

SEQ ID NO: 93470 - DNA, 1179 bp, Alcanivorax sp. 97CO-5
gtggctggaaaaaatagcggtggtacaaaacttcatgaaattgagccgcgggagaatgctggacgggaaactattgcacgttatcaagctcagtttcgcggagcggctttcgagtgcttgtctttgttggagggtgaggcgctagaccgagtatactgtgattaccaggacgatttcgtttctcgcctcaatgtaagcgggaactatgtttataatttctttcaggtcaaaaccaagggtaagttgaattaccaatggtctgtaaatgatgtcttagggataagaaaaggggctaagacatgcgagcctttcaagataacggaaagctaccttggaaggctcctcatccacactatcagatttgaaaaatcctgtgggaacgtcgtttttctcacgaatgttcatctgaatgacgatttagaggggttgcgcgatgcaatacagggttgtggcgataacagttattacaagttgttgattgagagttttaatgaagccctaaccccggaagcgccaatagaagatcagaagattatagatcgcattaaaaagcttcagattaaatctaatattccctatttaaatccgcacgatgatagattcttctccgaggcaagagaaactatttatcaatacagcgaaatagatttacagcgttcagagtgcgaggaaatacttaatagtcttatatctcttgttgagcgaaaatcgtttgggaagctattggaggaaatcggagaagaggagcttgatgatatagccggtattagtctttctgaaatgctagatattttgagtatttccaaagcagcatatcagagcttaagagatagtggcgactcacaagcgatcaagaatgcctctattattcataggttgatgagtaaggccggtgcgtcagagcggatgatagagttcgtgtctgactgtaaggttcgatgggatatatggtttagggataagcgtcatactatccctgattttgatctgaatattattcttgaagaaatagaaagcaatgctgctgagtgggttagatctggagaaaaactgccaattcttcgaaatagaattgataatgtgttgtcatctttggatgatgacaacttatcttccactcttaatcgtgagcttcttcttggcgctgttttctcatttctagttaggggggctgcgtga

SEQ ID NO: 93471 - DNA, 1782 bp, Alcanivorax sp. 97CO-5
atgaaactggttgaattaaaaatttatccttctgggagggatggctggggttctaaggatcttgtttttgctagtgatattacccagctatatggtccgaacggggcagggaaaacgcctgtcattcattcgattgcctacgcgcttgggtaccctgttcgatacagggacgatattatggcgaaatgttcgtcagtcaggctcactgtagaacatgaagggagtttgctcactttcgataggtctttttctaatagttttcacatagaggtatcagagcaaagttctaacgaaaagcatatcttttacaaagaatatgaggtttccgagtacctttttttgcgactcggactctcgcctatcgcgctaacaagcaataagaacgagcccgcttatccatatatatcgacatttttgcccctcttttacatagatcaagatgctggttatacgagtgcttacaagcctccaagtagtttcataaaagaccagtacgccgagatgataagattgggaattggaattgcgccaaagcattcgtttgaggcaaagcgtttacttatagaaaagaaaaaagatcttgatttgataaatattaaaattgttaacactgaagggtttatccaaaaactcgaagaggagtctggtgttgatagtgtttccgttgcagaactagaagatgagctggagcggttgagatgtgaattggaagaactccgtaatagtttcgatgctacgaacgatgcagattatattttgaaaagactaattcgtgataaaaaaaatgagcggctgaatctctctgcttcaataaaagatatagaaagtcggatatcagggtttaataagataaagggagaaattgaaatagagatcaatactttgtctcttaatgaagagtcccgtcgactttttagttcttttaaggaagtttgtgcctccccaggttgtggacttttcatctccagctccgattcctacggaaaaaatttactttaccttcgcgatcaaataaaagatttagatagaaatagcgggtttcaaaagatcagagtggaagaatattcatctaggttaagaaaaattgatgaagaaatcgcatcgctcgaatcgaattttacaaaagaagggaatgattcgcaaacagcctctttgatatcggcaataagttccttgacgcgatctattattgaccggcaacacaaaaaagaagtaatggggaggattgagtccgagaaaaaatgttacgtacagctattgaataggcgaagaggtcttcaaggcgatatttcgtcttttgaaggcggcgctagatcgagcgatataagaattttcgaattcaaaaatgcctatcgcaagaagatcattgaatggctggatgtgcttagtaccaaaaatgtttctagaaacattgctgtagatgctgattttaatgttatttttggaagggagaaattatcacaattcagcggcagtacccttttgcgaacagttcttgctctcagagctgccttctttgagctgttcatttctatggggtgtgcctctattgaatttttgatatttgatacgccgcggcagcatgatatcgaaactaaagattttgcagcatttatcactaggttaaaaaaaatctgtaaagataatcgagcccaaattgttttctctactacagagtatcattacaacgcagcagagggtgacattgaatggaagcctgagtttcctggctttgaacagccaatgtatttaggtgtaattggtggtgcctggccagaataa

SEQ ID NO: 93472 - DNA, 810 bp, Vibrio sp. JCM 19053
gtggggcaaggaattaatggcggagttgaggctgggcgtgggttttcgtttcagaaatgcgcagcgttatgcctattgctggatgactttccttcgttcggtaaaaggaagtacttcctagcatttgagcatcatgatgacttcttattcgcgttttatgatggtaatgacgaattggatgaggtcaaggcttaccaagctaagaaaaagtccttgtcttctagttggggaacaaacgacaaactagccgaaatcctatgtaaattaacaatgactggtcagcggattagccaagataatagtataaataagtctaaaaattatagtcataggttaagctttatttctaatgcggaaattaagctgactaacggtaaagctgggaaaaaaaagaagtcgattagcgtaaaggaagatactacgccaattagatttttgacgttggataaagaaatacagattaaactagaagatataattaactccaacgcagagccaaatgatatttctgaaatgaatggtcttgagtttgctaatattagtttaaatcacaatcataaagtcaataaagattaccttgtagggaaaatgacgagtatgtttggtgataaaatttcagattatgtagcagcattagatgtcttaatgactctgtttactgactcagaactagagtttaataaaaatggtttgccagagttaagtcattcagctaagtgggttgcaaaaagtcaaattgaaaatgcaatggatgtcttaactagtcaaaaaaagcttataatctttggcgaaagtatgctgaagtgttag

SEQ ID NO: 93473 - DNA, 657 bp, Vibrio sp. JCM 19053
atgaggaatagtgttttacgtaaggttcatagcgctcagaataaacaacgcccaaaattggattcatgtcccgtgtgcgaacagtctctaccaagtacagtagaagcactatataaatataatcaagagcttaatgatactgtacatcagaggtctgtggttgatgagaaattaaaatcagttcagtcaactataaattctgtagaaaagaaactatccgagggtcgaagggagctagtcggtaagtataaagtcttacaaaagctcaaaatgcttaatataacctttgatacttggatggagtatgaatccatacggcggctgtcagaagagctcgatttaaaactaaacaaggtgcaaaggaagctcgacttagttttaggtgagctgaaaggcatagaccaaagcgatattgaacgggaaagaaatatcgttagccgattatttttgcagaaatttaagagtaatgctaaagcattgcaggctacgatacctatgtcaccaagataccgtgatgtgtatgaaatcaattcttttccagcgcaaggtgttgagttacacaaactaataatggcttatcacttttctttttgggagctattgaaagacaatgaaaaaaatgcacaggctaccttttgttttagatgcagtctttaa

SEQ ID NO: 93474 - DNA, 1074 bp, Klebsiella quasipneumoniae subsp. quasipneumoniae
gtgaaccttgctgatgcattaatacacgttccccaagacgaacgtgggggagaaattgcgattcgaggatttgagtatcaacgatgctgggcaatagatgaattgttgaatcgtcataaaaaaaacgaatcatacgtatttatacctgagtatcatgatgatgttttaattcttaattcctctgaatcgcccactatggcaacgtttgcacaagtcaaaacaagagatacacactggacaatcactccgttaataaagtctgatggtgaaggtaagttatctttcataagtaagttgtttaaacataaatacgatttttcttcttataaaactgatttaacattcattactaatgctgtgtttaagttttttgataagtatgaatttaatgcagatgagctaaaggcgtcagaaaaagataaaatattagatgctgtgaaaacccagttgccgggatttggttctccagatttatcatctctcaaattcaaaacatctaatctcagtcttttggactacgacgcacaccttttaggcaaaacagtcgaatatttagaagatacaaaatcttctgaagtaattaatgcaatggcgttcaaaagaaccctcgttgacctttttgaaaagaagacaagagtttcatccagagaaattaaatcatttaaagaattaatagataaaaaaggaataagtaatgagcttatagctaagttgatctcagaaataaaatctcttaagacaagtttccctgactgggagaaaattagtattctgctatcagtgctgcacaaagatgaatttgaaacgctgatgcttaaaattaagtacgaattgttcttggtaaatgttaaggatataaattcaattgagtatgatttttatcgattattaaagcaaaaaagaattaatgaaaaatttaatgccgaaaatatacctattcatattgaagaaatgatctcttatgcattagaagaaagtgatgagttcagacaattgattgatgatgattataaatatataatggcatgttgtgcggttattgagaagatgtcaggcaatgaggcgaaaaaatga

SEQ ID NO: 93475 - DNA, 1665 bp, Klebsiella quasipneumoniae subsp. quasipneumoniae; identical to SEQ ID NO: 92533

SEQ ID NO: 93476 - DNA, 1128 bp, Zhongshania aliphaticivorans
atgagcagcgacatcctcaaatcctttgcagagacgcccgtcagagaaaccagcggctcaatgtcttctaacagattcgattatcagaagaactggtcgctatgcgaactacttgaattgcatgcgaaccaagatgactaccttatggttttcgaacaccatgaagatgtcgttgtctttgattcccaaagtgatccctcaggggtcatcttttaccaggtaaaatcaaagaaatccggaaactggacagtcggagctctaacgacctctaaaaaggaaagtccatcgataattgaaaaactctacgaaaactataagcggttttcggatatcgcggaagtcagtctgattttttcttcaaaccaacctctatctgccaagctacgaaacggagataaatcaatcgatctaggccgcgtatcattttcctgcttgtccgacaaagaaaaggagaaaataagatcggcagtagagccctccagccaggaatattgtaacctgcacggacttagcaccattgagacacagaaaagcgatctgagactttctgatcacacatccattgccaaaggaaagctcgtagaatttttcgaaaacctgcatccggaaagccaggtacatatctctctggtttacaaaacattttttgacgaaatcagaagaaaaacaaatcatgaaagagaaatcggcaacgattccgaactgcttcgccacaaagccatagggcgctctgacttcgagcgcatgataggtacggtactcaatcgccgaaatgacgacgacctgtggaacgatgccagcaacgtattgagcacggagaattttcattttcagcaaataagaagaataaggcagtgctggcaggaatatatcgtcgcaaaaatggattccaccaacgaattccacgcacaattttcatatgacgttatctgcgagatatcttcccatgacggagaagacggcataaagacattcggggatcttgctgaaaaaataattcccgctctttccaagaaatataagaacgaatacgatgaagaatatgttagatcagcaattttatacgaggcattgaggaatgagccaatatcgaagactgatacgaaacttacggaagaagaaaaatga

SEQ ID NO: 93477 - DNA, 1698 bp, Zhongshania aliphaticivorans
atgaaaaacttgcagttaaaaagcatgctactcgtatcgcatcgagaaaagaaagcaaggaagatagagttcgatccggacataacagtggtccaaggtgaaaatgacaccggaaaatcttctgtaataaaatccattccctatgcttttggggctaatccgcacaaaagacaccccaaatggacgaatgccgacatcctcatattgatcagattctctctcgatggaaaagactactcgatatacaggcaccgaaattcattttccctgtttgattccgatgatcttgaaatcggcacttactcaagcattaccaacgagcttgcgccggagctggcaaagctgttcgatttcaatctaaagctctccgacagagaaggcgttcctataactcctccgcccgcctatctcatgcttccattctatatcgatcaggataaaggatgggttgaaaactggagttcgtttacaaacctctcgcaattttcacactggaaacaacgtgtcaccggctatcatttcggattaagacccgataaatggtacgaactcgaagctaagaggaagaatcttgaaaacgacaaagaagagcctctccgccaaataaaatccattcagtcagtgaaagacaaggcctacaaagatgtctctcgtgtagactttaacattgatgccgaacaatttcgctgcgaaataaatcagctcctggatcgatgtgaaattcttaaaggaaatgagaatagctacaggcaaaaaatatccgaatacaaaaccgagaaaatcaggcttgaagcacagatcgaaatcgtagtacggactcacgacgaactcagtgaggactataagttttctacccaactcaatgatgaaactattggttgccccacctgtggggccaactactcaaactcgttctcggagcgattcgatatcgcacaagatacagaaacctgttcggatttactggcatcactgcgggatgatttaagggatatcgagaaaaagatcgacgatacagagagtctattcgcccagacaaaggagacacgcgaacagattaactcgcttctctcgcaaaaaaagggagaggtaaaattaaaagacttgattgatcttgagggaaagaaagcactcatcacgcatttggaaaatgaagaaggcgaatatcgcgccgttgtaaccgattatgatgagcgaatccagtcaacaacagacgaaatgaaaaaatatgacgaccctgaaagaagaaaggccatactctcacaatacgaggaaaatctcagacgaaacaccagcaagcttggtgtccactctctgagcgacaatgttttcacaaatataaacgcttctattgaagaaagtggaagtgatcttccaagagcaatattggcttacttttttaccgcgctaagcgctatcgaaaagaatggcaatgcaacattcttcccgatcataatagacgcaccaaaccagcaggaacaagaccccaagaaccttcaaagaatacttgaattcgttcgcgataaccggcctcaaggacgacaactgattattggactggtggaagatgcgaatatcgacttcggaggcaaggttttactttttgataagaaatactcagtgctaaacgaagatgactacggccccgtttccaatgaaatccggcaatttgaggctgcaaatctggcagtcgagtaa

SEQ ID NO: 93478 - DNA, 1080 bp, Burkholderia stagnalis
atgctgcaagcgaaattgaacgactccatcacaaaagaacgtggcggtaggcacggcggcaagggacacgaatttcaacggtattgggcgctgtgttatatccttcagttggatcttgaaaaagacgactgggttgttcttcttgaattcattgaggacatcgcagtactagatagtgagagcgctccgagttgcattgacctatttcaattgaagaagaaggaaggcacctcaaccaaatggacccagacggctctgagcaaaaagccgaaggaaggcaaatcgatcctcgcgaagttattcgagtcacggaacgttatccgggataacacaaggtctatcgcgttcgtaagtaacgctccggtcgagctggagctttcaagcgatgacagctccatcgaaaagacggagttttctggctcagaactctcaccggcagtacaaagcttgttgcaaacgaccattgcggccgagcttggctgtgacaaaaaactggtcgacttcgccgctctcacgtttgtgcgaagccctttggccatggacgacctcgagagccatgctatcgggcgggtcagcaagtatctcgctacaaagtttcccgaccatggagcgagagcagacgtcttttgcaaggcgctttacagtgaaatcaaggtcaaggccaccgagacacaggaatcttcctcgtacggcgaccttacgaagctacgcggtatctccaaagcgcagtttgccgggatgttgcatctgactctttcgcggaaatccgatgcagacgttgttgatgaaatcatcaccggactaacatctgaaaaggttccgttcattacgcgcagcgcaatcaaagcgagcgcgcaacgcttcctcattgataaggctgggagatcgtctacgctcacggagcagcttgtcgatgctgtagagccgtacaagacaggatacccagtcggcttggaaaccatgtgggaaatagccaactggatcgcggatcaagtttcaacaattccgccgttcaaggaatccggtgttttcgatcggaactatcttcttgcagtcgttctctacgggttgaaccgatga

SEQ ID NO: 93479 - DNA, 1749 bp, Burkholderia stagnalis
atgaaaagcttgcgattcagaaagctctggctcgtgtcagagaccgaaaggtcggcatacagggtgaacttcgattcgaacaagacgcttctcgtggggaagaaccatacgggcaagtcaacactggtgaagcacatcttcagaaccctcgggtgcgacacaagggggaaaagtgaccgttgggacagtctcgcactatcggcgctgcagttttcgttggacgatcaatcgtatacggcctaccgccggatgaatgtgtacgcgttacgcgatgacgcgtcacaatcggtgagggcaacgacaagctatcgtgagtggagcgcaatcctcgccgacctcttcgactttcgcctaatgttgccgacacatcaagactcacttgcacaagccacgcctccatatctattcctgccgttctatatggatcaggactcgagctggatccagcaatggagcagttttgataagctgagccagttctctagctggaagaagccgcttgtagcctacattacagggcagcgtccaaacggatactacgatgcgaaatttcatgaatcgcgggccaaggatgccgcagccaaaacgcgcaacgaattggatgttatgcacacggcactcgcgcgtgtaaagaagtcacttccacgccccgtcgtccgcatcgacaccaacgcttttcggaaagaaatagcagacttgatccacaagtccaccttactcaaatccgagcaggagtcgtcgcgcaagagggtcttcgagtttgcggcccaaaagcaagctcttgggagtcagatcaccgcagcccgcaacgcactgcgagatcttgagggggatcttaagtatctgacggaatcagaagcgcgtccgacgctcacatgtccgacttgcggcagtattcacgaaaatggatttccggtgcgcctcgaattgatagaagacgcatcgacgttgcgcaccgtaatcgccgaattggaaatggatttgcgcggagtcgagcgacgtctctccgagaatgagggaaatctgaatcgacttcgacgaacggcacaagaaattgaatcgacgttgaagatgaagaaaggtgcgctgcgcctccaggacatagtcaacagccaaagcgttcacgtcgtgcagggggctttccagaaagacatggacacgctcaaccgcgaccttttaaagcaggaatccgatgccacatcattcaaggagaaagtcgcgcgcttcgacgtccccgatcgaaccaaggcgataaacgaattttattcggagcgcattcagcttttcgcgagtgaactcgaagtacaggacctgcgtgaagacgttaagaagaaacccgaagcttcgatttccgcgacgggaagcgcactcccgcgatctttgctcgcatatcagttcgcggttcttcatacggccaaagagtcagggaacggtcaccggttccccgtcgtcgttgactcgcccaatcagcagggtcaggacaatgagcatttgatgcagatgcttcgatttatcgagaggcgaacgcccgctgaccagcagctaattctggctgttgaagaaatgccactcagtttccagttcgcaggagagatcgttcggcttgaaaagccctttgcgctgctggatcccgaccggtacgaatccgttcgggaggaacttagtgttctcgttgcgtcggtacagaaggcgattgataaacgagtcgcgacgacaaaggacgactccaacaccgaagacagtgcgtga

SEQ ID NO: 93480 - DNA, 1131 bp, Burkholderia stagnalis
atggcgtcatccgcaacaatcgtggagctctgtcaggttgagaacgatgatgatctgcacgaattcgggggtgggcacggaaacaagggcaacgacttcgcccgattctggctcataagcgagttgatagcgctgaccgaagtcggcacaagtgactacctctttattctagagtacgttcaagacgtcgctcgcatagacgacccggcggcacctgcggcgatcacactatatcaactcaagaagaaggaaggcagcgtttgggacctcaactcgttagctggtctcactgaaaagggaaagcaggtcaaacccgcgtcgccactcgcgaagattgtgaaatccgtactcggctttaagatgctgtcggcaagcgccgagttcatctccaacgcacgatttaacgtcaaacttgctgcgggcgggactgctcttcagatggactatctttccttggcagacctgcaggttgaaaggcagtccaattttcgtgacagtgcagcagcggcccactcggtaccagcagcgaccattcctcttcagaaaattggccttcggtatgcacctatcgaagtcaacgacatgcgagtacatgtcatcggggttgctcacggattcctcaagaagctcagtatcgcacatgcggcacaggctgactcgttcgtggacgccttattcgcaaagctagcgaccgcctcacgcaacacgtccaaatgccagacgtgggaagaactggtcagtaagcgcggttacagcaagaagcagttcaacgacgcactcgccgcgctacaactgctgcctgatcagcaaggtcgacgtgaaactctgctcaaggagctcgcatcagcgctcgagtggcacacacgtgatcagatgaggatagaagtcgccctcaccgaactagctcggttgaaagtcaccggtggcgaactatctatcgcgaacgtcgattgggctgcactgcgcgccgtgagcgcaacagcagaagccgaatcctggtcaaccgcaaaggagttcgaggccgtcgagagctgcctcaagggatttcttccagacgaatccgtcgcgcgaatacgcgcactagccatttacgggatggtccaagcatggacaagccaaacgttcgcctaa

SEQ ID NO: 93481 - DNA, 294 bp, Burkholderia stagnalis
atgaagagtacggagtcgttcttgcctagcccaattgtcatcgactcgccgaaccaaaatgcccaggaccggaagcaccttgagcgagtgatggggctgttggcgagcaaaacgccagcaaacgcacaagtcatcctatgcgcagaagaccccagcgactcgttcaatcctgacaaggtgatccaactcgaacgagagcgtgcgttgctcgagtcagatcagatggacgaggtctctgcccgcgttctgcctttaatcgagcgcgccatcacagaacttagtcgagcaggttag

SEQ ID NO: 93482 - DNA, 1146 bp, Burkholderia territorii
atgagagacttggcaagcgacgagaaaacgggcgtgaacgccagtttgggcttcacgtaccaacactggtacgcggcgctcttggccatcgagcgcttcggcgtgatggacgactaccttatcatccttgagttcaaggaagacgtagccatcgtcgattcttccgagcagccctcacgagccgaattccatcaggtcaaaaagaacgagcagcacggcatctggactttgcgcgacctgctcgctaccagcacgacgaaatccggggcaaagacgatgtccaccatggccaagctagtcatgcgtcgacactgttttcatccgcatccaaccgccctgtggttcgcgtcgaacgtaggtttcaaactccctcttgaggaggatgaaacgcctcgcatgacgcatcatgccaatctcttggacctgtgcgacagcgagttggcaactcttcgggcagcgctcgcgaaggaactcgacgtcgatgaggattccatcgtgctcgacgacttccgactgatacggactgggctgccgctcgacgaacctcatcgtttcgtcgccggaacgctggatgagctcgctgaaaagaagaagctccctttccagatgaagcgaccggtgctcggcgccaggatggtagccaacgagtttgcccaggtcggaagcaagaacagctacgcaaagacgttcacccagctcaagaagcgcggtgtttcgcgcagccaggtcgcagaaatccttgtgcaggtggagaacttcaagcaggacagcagccatgacgtcctgaaagattgcttcgcgcgactcgacgccgaagtgcacgactacgaaattctggaagatgtgaagtccgagctggttcgcgtttgcgccgacctgacggaccggacgaacatcgaacttcgtgctatatgcattgcgttggcgaaagcgcgcgacgcgttcaagcaggcgcaaaaacgcttccggctgctcggcgaacagatggaggcgatagtctatgatgcggaaaaagccagcccggaactatgcggtagctataccttaggatacctccattgcctcgctcttctgattataaaaaatgcaaccgacatccttatattcactgctgcgcctggtgcgcaacaagaggttaaaaagtga

SEQ ID NO: 93483 - DNA, 1737 bp, Burkholderia territorii
gtgacccggctcgtgaccttcaagaagctctggctagcatccgagagagacaagcgcgggcgcgaactgagcttcgggaaaaggactctcctgctaggacctaaccacaccggcaagtcacgcatctgcaagagcctttattggagcctcggatgcgagccgcagtcgttggtatccggcaactgggacccggctacagtcggcttgctcgagttctccttcgcggatgaaacctacttcgccctgcgcaagggacgtgcgatgggactgttctcatcccagaagcgcctgctgttcgcgaccgacagaaacagcgaatgggtcgaacgaacggcgaagcttttcggcttccatctgaggctgccgcggccaggtggcgcagcgtacggccaggccgggctggactatatgtcgttgccgttctacgttgaccaggatggtagctggggcgctgactggacgacctacgacaaccttggccagttttctcgctggaaagagcctgtgtttgcaacggtgaccgggtcgcgtccgagcgcctatctgattgcgaagcagaaaaaggacgagattgaccgacgcttccgcacgaaggaagctgacctcgccgcgcagaaggaggcattcctgcgcgttcgcgaatcgcttcccaaggcgactccctcgctcgatataagtgcgtttcgggcggagcttgtcgagctggcaaaggcggcccaggcggcgcaggccgaacagatgaaggcacgcgagcgcctcatcgtggtcacgggcgagcgccagagcctcgagtccaagctgaagctggcaactgccgcgcagcgtgacctcggcggagacttcgagtacctcagcgcagtacccgacgacacccagattgagtgcccgacctgcggtgttctgcacaccacgtcgttccatgcgcggctgtccctcgggcaggacctcgaagaaatgaacgaactcgtcgcgcaattgagcgacaacctcgatgcgtgcagattgaaggagtcggagttacgtcagacgcttcgtaatatcgaacgccacgtcgagaagtacgagcaggcactgtctgcgggccgctcgcgcacccggcttgatgaggtgctgagcgctcatagcaagcgcacgctcgacgaagcgttctcgaaagtggaatctaccctcggtatcgaagtcgccgcgctaaggaaagagcaagcagcagctgaagatgcggtgaagcgctatgacgacaagcaccgcaaagctgatgtgagcaagttctacagcgccgagctgcgacgcttgtctgacctgctcaacattcccacatccgaacgcatcgaagacaccgggattgggaagcgtccgaaggcaggtggtagctcggggcgccgcgccattctcgcggttcatctcgcgctgatagcgtgcaacttcgagaaaggcgacctaccgctgctccccgtcatcatcgacacattgcagcagtcgggccaagatgacccgaacctcggacggatgttcaatatcgccgcggaccatatcggtgaaaggcagcagttgttcatcgcgatggagcggttgccggccgaggcgactgtcgataggtttgacgtgcagatgtttgaaacgcagcaaggccttctgcgcagcgacgagttcaacacagtggcgctgatgattcgccccatgttggacgatgtccgagagcgcatccagcaacaggtgtcagcaaaacgcgattcttga

SEQ ID NO: 93484 - DNA, 1146 bp, Burkholderia territorii; identical to SEQ ID NO: 93482

SEQ ID NO: 93485 - DNA, 1737 bp, Burkholderia territorii; identical to SEQ ID NO: 93483

SEQ ID NO: 93486 - DNA, 1101 bp, Burkholderia territorii
atgcagttccaagcagctgcctatgcggcgcttgagatcctgagcggcaaggagatcgaccgggtctactgcgattatcacgacgactttgtcgtgcgcagaaccgtagcgggcgtggtcgactaccacttcttccaagtgaaaaccaagggtaaggcgaaccagcaatgggatatcgcggaggtgttctctctcaagaagaccggggcactggatacagaagagaagttggaggcgatccgcaacagcatcgcgggcaagctgttcgtgcacactgtcgaatttggcgaccagtgtcgtgaaatcacggttctcagcaacgttcacttcaacgacgatgtccacgatgtcgtcacggatctctccgctggtacgtcgagcaagaagtacatccgtcatctcatcgaaaaatttgctgaaattgtttcgcctgagaccccgctgtcatccgagcaaattgatgcggctcgaaagaagctctccttgctgccgaatgttcagtacatcggcgacacgctcgaagcgttcagtattgccgcgcacaatgctatctggaggcacagcgagattgagctgcatcaacacgaggttgagcgcctcgcaagaagcttggtgacacttgtcgaggaaaagtcctgctctcccatcagcgggctatccaaggcagacatcgatctagcaactggcgtcggcctagaagacctacttgatgtcttgagcatttccacccaggtgtaccagactctacagcaagggggcgaccccgctgccattaaagtggcgtctattcttcagcgaaagctgaaggaggcgggtgccactgaatccatgatagaggcggcgtcgcgcgcgaaggttgcctgggacgtctgggttagaactgcgcggcacacattcccggatttaacgttcaacgtcttgctcgacgaagtcgacaagaagtgcaaggcatggttgcttggaggaggcgtcttgggagatcttgagaacttcgttcaagcaacgctggactccccgatcgcgaagaagttcgcggcactagatacggacctggtgttcggagccttctgtgcggccgtcgttaggagggctacgcgatga

SEQ ID NO: 93487 - DNA, 1803 bp, Burkholderia territorii
ttgaggctgaagtcactgcagatcgaatctctgggcgacgtgggttgggaaagtccgctcctggagtttggctacaggaccacgatgctgttcgcgcgcaacggcagcgggaagacccctgtcgtccgtgcgcttgcgtccgcgctggggttccccaacaactttcggacagacattctcgagaaatgcaacgcggttgtcttgcgcgccgagtcggaagggaaaccgctcacgatccgccgcaccatcgacgcgacgaacgaggggttttacgccgcgattgatttcgatggcgagcaaaccgaacactattcacagggttccttctccctcgcgctgtttcggctgcttgggctgaagccgccacggctggtgtcgaccaagggcgaggaggcacagccctacatcgcaaccctgctgcccctgttctacctcatacaaggctacggatattcagctgcttaccgtgccccaagcacgttcatcgcagaccaatttgcggagatggtgcggttcgccttcgggctgaacccaaagcattcctatgaggtcaagaagacccttatcgaagagaggagtgccctcgaggcacagacacgtaagatcgttgccgcacagcgtgtgcttgagtaccagagccgtggcgtggacgatagcgatgcaaaccaagctgtgctgcaacggacggctgaaaacctgacgcagcagatcgacggacttcgtgcgtctgtggacgcgaggggaatcgcgaactcgacgctcactgaactgctgcgtcagaaggacatccaaatccgagcgcggcaattagagcttttcgaactgcaaaatcgtgtcgctggcatcgagactattcgtgcggaaattgatggcgaggtcaagaccctcgggctgaacgaagaggcccggcgtgtcttcacgtcgtttcaggagatctgccgcacgccgaactgcgggttgtttctaggtagcacggaatcgtacgggaagaacctcctgtatctcaaggaccaaatcaaggacctggagaggaacagccagcgtgccgagattcgggttgagcaattggaggagcggcttaaggagctaggcgcggagcgccagacgctcgtcgacaacctcgaggcgcccaatacctcggacgtcgaccacttggtgacagcggtgcaggccttgaccaagcaacttgtcggcgtgcagggcgaattgggccgaatctctgggttgaaggaagagcgctcaaagttgttcaagctggagcgagaacgcgatcgtatccaggatcgcattgacgggttgtccaacaccggtagagcagacaatgagttcaacaagcttcgattgaccctccgcgaactcaccgtgaaatggatgcagacgcttgagacgcaaaacgtgtcgacgaacgtcgacattgacttgaatcttcgctttacgttcggaggcgaaacgcttgatgtcatcggcagtggtggtagcagcagcacgacgatcagactagtcctcgccatacacgcggccctgctggaggcgtatctgtctgataagactcgtccattccgcttcattattctcgacactccgaagcaggaggaactccacactgccgacctggcccgatacctcacggagctcgagaagatgtgcgaggcaaacgatgcgcagcttatcttttcgtccacagagtacgaccatccaaccggcccgaaggacaatcgttggttgccgagttaccgcggaccggacaagccgatgtacctcggcaagccaggtgatctgctagcagacgatgaactgacgtga

SEQ ID NO: 93488 - DNA, 1086 bp, Halomonas sp. KO116
atgtctgatacaaaaaatgatactaactcaggagttgaagctttaactgggttttcatttcaaagaaatagcgccatatttcttgtattagaaaactatgacttattggttggaagtgagttttttatctgtatagagcatcatgatgatgtgatttttgctgaatttaacaactcaaacgagattagtaaaattaaagcatatcaagctaaaaagtcttcctctgaatggatgctcggaaaaaaattagctgaaatacttgctaagatgacaaaagttggtagtgatcttgcagacgatgaaatgtccaagaatactggttattcacaggacttgatttttttaacgaataaaagcattagattgaactgtgggagtagaaaaaaagaacaaaaatttagtgagatagtaaaggagaataatgtatttgtttgctataccaatcttcatggtaatattcagaataatatattaacaaagcttgatggtttttcatttgaagttcagcagcttgaaaatgtttactttaaatatatagatgtcgcaaataccgataagtctcaaagaaatcaactttcaggcatgttgtcagacttgtttcaagataaaatatcagacccgaatgccgctctaaatcttctgctaaaattatttagagaggttgagacggtctataatcaaggaaataaaagtaagttgctcgatattagcaagagagtttatagtaaagatatatttaaagctatagatgtaatctgcagcaaagcaaaagcgtttaaattatggcgcgagaatgctaaagaattgtcggaatttcttcagattccaattagcagaagtagcaactatacagagtatctgaatgactgctttgattattttaaggatcttaagcaggttgagtttcagaagatttatcattttgttgatgataacagagatgttgatgagtcttcatattcgcatgcagattgcataaaaaaaattagtgaaagattcacaagagatcatcaaacacaattaaataaagtattggtatcttttgctatagtagccgcttatgtagaaactaggaatgcaatataa

SEQ ID NO: 93489 - DNA, 1752 bp, Halomonas sp. KO116
atgttagttaaatttaaaagtttgctagtgttttctgaagaaggtaagaagtgcttctatacggatttttctgatggaatcaatattgtcaaaggaaagaatacatctggaaaaagcacactgatccagtcaattatttatagcctcggtataaatgatggcaatgataaattacaggaaattctagatgagcagcttatatttcgtcttgacctagaacgaacctttaatggtagcattagcacaattactttaatacgtgacagccagtctttctttatatatgaagcaggaaaaagtgcgtttcgatttgatggtattaattcagacaacgcgtccgagcatataaagcttaaggaaaaaatatcttctatatttggatttaatttggcgcttgagagtaaggaggaactaaaagaggctcctttggaagtaatgcttcttccttattatatatcacaatcagttggctgggtgtatttaagggagtcttttagcggcttaaatttctataaaaattttaagttttattaccttgattactatttaggaatcacttctgatatcgacaggattttgctacataaatttttgcgaaaaaaagcggagattgttcgagaaatagaatttctagaacaaatgaagaataatgatgaaaatcttcagctttctcaattgcttgatgaggagtttagaggggaagcagtgaaataccttgaagagtactcggaacttagagaaagtctaataaaggaagagacccgtcatattcatttatgtaataaaaaaagtttgtcgctcaacagaaaaattattcttaatagaattaaacgcaatatttcacatcagcgacccgaaatagatgcttgccctgtttgttctcaaatattaccaaactctcttgaagcagtatatatacaccagcaggatataaatgatacagagagtgaagtttatacggttaaagcggaaattgccgatttgcaggcaaaaatcaattctacatttaaaaaattaaaaaaaataagtgatatagtggaaagaaagtactctgtgattaaaaactatcaatcttctagctcaacagttacgtttgatacttggttagatcacaagtcaaacatgaaacttattgggaatatcaactattcattatctgaaaaggctatagagctaaaggggattctaaacgatatcgatagtttcggtattgatcaaaatgttgaaagtattagacatactaaggagcagatttttctaacttactttcagagatgcctttcagatttgaacctatctaattttgacgaagcaagatataaacaattatacaaaatcaattcatttccttgtcaaggtgttgagttacacaaaaccgtaattgcatatcatttttctctaaataagttaatagccaatacgcaaggaattcaccgctttccatttattcttgatgctgtgatgaaagaagatatcgatgaagaaaacagaaggataatctttaagtttcttaacgatcacgcccctagtgatacacaaatgattttttcggtttcagaatctttgtcgcactcaaaagatgatgatagaactacaaataatattgagttagtaaataaaaattatttttcaggtaaggggaaaattattcaaatcggcaatggcgattctgaaagatcatttctaaataaatatggcggagagtatgaagagttgattcagaagacattgagaatgattaatatttcttag

SEQ ID NO: 93490 - DNA, 1092 bp, Flavobacterium sp. KMS
atgatagataaaacaataaattcaggaccagacgctcataatggatttgcattacagagaaatactgctatttatttacttttagataattatattaataagtttcaagataaaaactattttatttgtcttgaacatcatgatgattttttgttttgttttctaaatgaaaaagaagaagttgatttaattgaagcatatcaatctaagaagaaatcgcccagtatttggcgagcaaatcctgagttatttgaaattttaaacaaacttttaaaaacaggcaaaaagttaattttagacaaaatttcgaaatctgagcaatacaaacatattctctatttttcaactaatcaaactattgaaataaagaaaaaatatccaaaaaaagccaacaaacctgatattagtatttctataaaaaatgataatccaaacatacaatttggaaatttacatactgatatccaagagcattttaaagcaagcatcacagaaactaatcttcacgatcaattagataaattgaattttttatggataccttttacgacaactgcaaaagaacaagaaaatcaattagaaggtaaaattagtgaggtttttggaaataaaatttttgacaaaagagcagcaatagattcacttattagtctttttagaaaaattgagggaatatataatcacggaaatgaagtccagttgttagataaaacaaaaagagttgaaagtgataaaatagaaaatgcattaaaagttttaacaactaaatcaaaatgttttgattattggcatttaagaaaaactgaaatttctttaaaattacgaatcaaaccaattgaaaaggaaatttttgaattagcttttgatagtgcatttgatttatttaaaagtattcaagaagctgaacatcaaaaaatattgcaattcaccaaagagcaaattggaaatgttacaacttattcagaagaagaaaatgtaattgaattatttgatatatttcaaagtacttgcactacaaattttaatgaattacaaattaaagcaatcttatttgcttcactttttgaagtattatatattaaagaaaaataa

SEQ ID NO: 93491 - DNA, 1719 bp, Flavobacterium sp. KMS
atgagaactcaattaatctataaaaacttctttatctattgtgaaaaaaataacacaagtttcttcacagaatttgatgaaggtataaacataattcacggaaaaaacacgtcgggaaaaagcactgtaatacaggctatacaatacacatttggtattaatgatgaaaaacacaaattatttgaaattttagatgaaggagtgatttttagacttgactttgttttaaagaaaggtaatgacgaaaatttaactattattagagataacgaattcatatatataaaaagagaaaatcttccattaattaaatattctggtattggagcaaataattcaagggaacatattttacttaaagagtatttaagtaaattaattggttttaatttaaatttagaatcatccggagaatataaattagcctcgttagaggcaatgtttttgccatactatgtctcacaagattacggatgggttttggctttgaaatctttcagaggtttggatttttttagaaattttaaagtggactattatgattattatcttggaataacgaacgaatttgataggttaaaaaaacaagaattagaaaaagataagaaaaattttgaagctagaataaaatttttaacagatacggagaaatatgatgatgattttaaactttcaaaattaaaagatgaatcgtttgttgctaagtctgttgaatatatagaatcctacaagaaaaacaaagatgagcttatacaaatagagaaagagtatttaacaaaatgtaataagttaacatttattgaagaaagattaaaaattcttaaagtagttaaaaaagctctaaaaacagagaatccagtagaaaatgattgtccaacttgtcgtcaaaatttgccaagttccatagaagatatttataaatattatcaagacttcaataatacagaatcagaaattgctaagctgaaaaacgaaattaaagaaataaaaggggcaattaatagtttagaaactgctatgtcggcaaaaaaagaaattgtttcaacggactattcaatcctgcatgaatacaaaatcgctgatttaacattcacttcctggttagataacaaaactaaaattcaattatcaaataatattttgtctcaaataggagaaactacaatagagttaaataagaaaaataaagagttagaagcctttaaaacagatgatgaattaagaaaagagcgtaataataaagattatatttttaagggatatttcaaagattttcttaatgagttaaatgtgaaatcttttgataatgagttatacttattattgtatcagatgaagatatttccaaaacaaggagttgaattattaaagactttacttgcctattattttgcttttaataaattaattgaaaaaacagagtatgttcacatattcccatttatgatggatgcagttttcaaagaagatatcgatgaagacaaccgaaaattaatacttgaatttatatacaaaaacaagccaagtaacaatcaactaatcttttcttttgcagaatctgagaaaaatgcaaaaactgcatctgaatataataaagaaataatgaatgatgaggctaacttaattttaaccaatttaacaaatgaaagatctttattaaatactttaaatgataagcaaaaagaatatttgcaagagacactatttttaattgaataa

SEQ ID NO: 93492 - DNA, 1089 bp, Roseivirga sp. D-25
atggcaaaacaaataaccaatagtgtaaactcaggagttcaagccaatgtaggaatggattttcagatacattgtacaatttttttattccttgaaaacttcaagtccttgcatggtcaaaggtactttatcacaatcgaacacttagaggacattgtttttgggtatttagattctaatgaagagttaactaaagttgaaacctaccaagctaaaaaagcaacttcagcatggaagattagtgacttatatgaaatactacaaaaaataacagaagcaagtcagagtattcttgatgattctcaccccaaagctaatggattctttcaagagaattattttgcaacgaataataccattgacctaaaaacaaaagtaaaaacaacgtcataccgagaaataataaatgaagctaatagtaatgttcattaccctagtttagaccaaaacatcaaaactaaaatagaacaaggaaatagcacaatttcctttacaactgacaatctcaaaaatttagcgactctaaactttaaatacattgatttaagtaggacttctaaatcgcaaaaagaacttctacacggcaaattccagactgtttttaaagataaaataacagatcatatggcggcactggatacatttatactttgtttagataaattagattcaacatttaatcaaggaaacactgcgaacttaagtgatttatccaaaagagttgaatcacatgagattgagaaacttttagctttattaactactaagaagttagcctacgatttttggagagataaaagtgatgaactgtgtaaagaacttaaaatttcattacttgataggtcttccttcgaactcaactatcaaaacagttttgacctttttaaagatttaaattcgcgtgagcatcaaaaggtctttaaatttttgaaatccaatatttcaatcttaggcaatcatacttctgatattgactgtatatcagaatttatcaaagaatttaataagaaaaaatcaacgacattaagtagcacacaattaaaggcaacgatatcagccgcatatattgaaattaaaaacacactttaa

SEQ ID NO: 93493 - DNA, 1731 bp, Roseivirga sp. D-25
atgcttaacttaaaaataaatagcgttctagtctacagcgagttatctgataagtactttttcactgaatttggagaaaacctaaacatcatatacggcaaaaacactgcgggaaaaagcactctcattcagttagttttatacgcttttggcatcaacgacaacaaactcaaattaacagaaatactctctgaagaaattttcgttagactggattgtactctaagaaaagatgggatttcacagaattatgtgtttgtaagacaggatgaaacattaataattcgagacaacaacgaaaaaacaatcaaattcaatggaataggtagcgatcaatctgctgaacatatcaaactgaagaaattcttcaacgatttattcgatttcaatttaatgctagaatcgacttcgggaatttcagaagccccaatggagacaattttccttccatattacgtttcccaagacgtaggctgggtctatttacgtaaatcatttagtaatttaaatttttacaaaaatttcaaagaagacttcctcgactattatcttggaatagaaaattctgaagaccgaaaggaaaaaagggagatcgaaacacttataaaaagtcttcaacaacagatttctttttttaacaaaattgaaactgacaatgaagaacttgaagtatctcaaattattgaggattcattctcgggaaagtcaaatgaatttattgacaatttctctagtaataaaagcaaactactggagcttgaaaataaacaaattaaggaatcgaataatttagcattcctcaatcaaaggttgtctgttgtttctaaagttaatagaaaccataaaaatcaaaaaccaggtacagatagctgtcctacatgttctcaaactctccctaagagcattgaagacatgtatgaatattttcaagaggaaaatgacacttcaaaaattcagagcgagcttaaagagaaaattaaaaaaagtcaggcttcaatcaattctataaacaagaagattagttctttaaaagaagaacttgagtctgaaacgagaatttacaataagtattcagtcgataacttaacttttgaaagctggatcaacaacaaagctaacatacagctaaataataatatcacttcacaggttggtaggttaagcttaaccttagaagaacaaaaagagaaattatccgagtttaaaacagatagtgaaattttatcagaaagaagtaagaagagtaaaatttttaaagattactacaaatctaataatgcttttctaggactgccagaattgaaagaaagtcgttttaatgatctctacgatatatctagtttcccatttcaaggagttcaactacaccttgcagtattgagttatcattttgcatttaataggttacttacagattcaagtggtattcatcgaattccatttattcttgatagtatctttaaagaagatattgaacaaggcacaaagaacaaaatattaaagttcattaactctcatcatccgaaagatactcaaacaatactttcaattgctgacgataagaatgtcgatagtaaaattgagacttactcttcagaattcttcaacaaagaggcaaagatgatctgtataggtgaaggcgttagagaaaaatctcttttaatcgataatgatggtgagcaaaaaacactaatcgaaaactcgtttgaactacttgaaaatgaaaactaa

SEQ ID NO: 93494 - DNA, 1110 bp, Burkholderia sp. MSMB617WGS
gtgagagaccccaaaccgcgcctgaccaggacggcagcggcatcgagtggtacgcccgcgagcaacccgctctacgtgtctcagcgggagaaagccggcgctgctaccttcgaccgcttcaacttccagtacgactgggcgctttatgagttcctggagcagcacaagctcaatcaggtgagcatcgtattcgtcgagtttcacgaagacgtcgtcttcagctcttctctggacgccgccgatgccagattcgtgttctgccaagttaaggccggtgcgagcgcgaacttcaacaagaaatcgctcgtcaaacgaataaagcagaagccatcagtgcttgggaaaatgttcacaagcgtgggcgacaagaaaattgccgcccgggtggacaaggttcggcttgtggcaacgggtggtttcaagcttgagttggcagaaaaaggctttcaactcgaagaaatcccatgggatgcgctgcaccaggagacagcgaacgagataagcgcagctctcgcggcagaactcgggactgactgcgagctggaaaagctccatttccataagccacagcttcccgagctgcaacatcgcagagccgtcatcgggctgatagccgaccttatcagtgaacgggtcccgaatggaggcggagactgccaggccatttaccatgttctgcaagacgaactccgccggaagggtgtccatacctgggactattccgactgggaaagccttgtccgcaacaagggcctcactggccaacgagtggacgcactgttcgaacaatttgcgtcgtccgccacggtcgacgacctcctctcggactttgagtacgcaaccgctcagctccaatacgaaccgagagaacggcgaaaactccggcagtccgctcggacttacgtcctgaatactcttgacggcgggtctctcgcacatctgcaggtacgagctgcggtgtcaaaacatttgcaggccgacttcccgctaaggctgaccactgacctgttgacgagccttgtagcggcatccccggatgtcgtgcgtgaacaccttgtcgacgaaacctcgttggtcgccgcatacatcattgaatacctgcgagcctga

SEQ ID NO: 93495 - DNA, 1704 bp, Burkholderia sp. MSMB617WGS
atgagcgcattgatattcaagcaactgttcgttcaatcgacttcccaaaaactcgcaggacgattccgattcgaacccggcttaaatctgataacaggtgatgacaattccatcggcaagtctacgctggtgcgattgccgctgtggactctaggctgcgattttgattttgacactctctggacccccttcgatgccagaacgattctggagttcgaggttgacggtcgcacataccttgctgcacgtcatcgcaaccaaattcgtctcaaggttggcgaggcgccgtggacggtctaccacagtacgagcgatgcttatgagcaggcattcgccagcatcgtccaattcggtgcggtgttaccacgccgcaaagaaaagtggattcatgaagtgccgccgcctgcctgctatttctccgctttctacgtcgaccagcgacgcggatggactgagccgtggggaagtttcgtcatccacaaatatgaggactggcgacgccccgttatcaacttccacgtgggctatcatccggcatcctatttcgaggtaggtgccgagatagcgaagggccttcagcatattgacgccgacgaggggctcattgaaaagtatggccgcgcggttgaggtcttgacgctgctcgctcctccagaagaacttccgacgaccgacgccgaactcgattcggccattgcagacatccagaattcaatggtcgccgttaagcggcgtgaacagcgtgcattgtccgttctacgtgccaagcacgaagaactcgaaattaccaaggtccagcggggaattgcacaagcggccgtggatgacatcgagaaagactacgatttcgcatctacccaactgcgcgatgatgttctcgtctgccctctatgcggtacattgcatgacaacacccttctagagcgcgcgtcgctcttgcaagaccgcgcacaggccgaacagcaggttgcgttgctcacggctacgcagtcgaaaatcgaggcgacaatcgaaacgacactcaggcggctcgacgccgtccgcgaagaactagccaagctcaaccgacgcttcaagcgtctcgacaaagacgtgaccgtcaagagcatcctcgagaccatggggaccgattcagtacgacgacgcgcggaggaggtgaccaccaccgcgagattacgattgcgtgccaacaggaaaactctcgctgagcagcgagcagcacagagtgagctcattgaggacgggaaagaagagagcatcaacgcctactaccagagcgagctggccggcctttgcgacacccttcggctctcaccggccttcgatgtacgcacggccctgccaactggatacagagaactggccgtctcaggtggcggagcagacagctctcggatgcaattggcctatcacttgacaatgcatcgtctcattcgtcacttcaagactgaggtactcgcaccgttgattctcgacacgccaaatcagcaagaccaaggcgcgctgaattatggcctcgtttcggaagaactcaagcgccgtgcgacgaaggacactcagctgttcgtatgtgcgacacgccatgcggcaatgcaaacgctagagaaagactcgaccgtcattcaactggacgagaatcgattgctttccgccgagtcgtacgaacgactccaagccggcttcctgcgcgttttcggtgagtag

SEQ ID NO: 93496 - DNA, 1161 bp, Burkholderia sp. MSMB1072
atgaaaacgatagaagtcgtcgcccctggggaagacgtcggacgtgaaacgctgtcgcgtttcgacatgcaatttcaagcggccgcctttgcggcacttgagatccttgagggcaatggtgttgagtgcgtctattgtgactaccatgacgattttgtagttcgtcgggttgtcggtggacgtacgaccttccatttctttcaggtaaagacaaagaagaaggcgaaccaccaatggagtcttcttgaaatcttcgcgttcaagaagattaagcagggggtcgatgctgaaagcttgaggaagatcaaagatagcttcgcagggaaattactaacgcacgggatcgtgtttgacgatgcatgtgccgaggtgaccctgctttcaaacgttcattttacagacgacgtgataaccgtcgtcgacgaatgtcgcgggaagttgccgaaatcaaagtgtgcaaccttcctctcgaagcactttgatgccatcttcgcaattgatgcgggcgatgatgccgcgaaggcagatgaggtgttaagcaaactctcgctccggccagctgtcgcgtatatcgaccatgacagagacgtgttcgcatccgccgctcgaacggcaatctacaattatagtgaagtcgatctgacctatcaggaaaccaacgaaatagcgaacagcctgctggatttggttttcaaaaaatcgaaagcttcgcttgaaggcgtaaggccgcacgatcttgccgatcaggtcggtgtcgcactggatgaccttcttgaggtacttagtatctcacgggcggtctatgacgcgctgcgtgccggcgaggacaaaaaggccttgaagaccgcctccattcttcagcgctggttgaagacgtcaggagcaacggacgacatgatcgagtttgcttcgcgatgcaaggtgaattgggatctctggcatcggcgagctcgacacatctatacgccgtttgatctaactttcttgatggacaagatcaatgcgctgtacgctcaatggatgaaaggttctggcgatttttctacgctgtacacgctcctaaatgatcttatagccgaccctatctgcgagaagtttgaagcgatggatcgggagctgttgttgggggcagtgtgttccgtcggggtgaagcagcgatga

SEQ ID NO: 93497 - DNA, 1764 bp, Burkholderia sp. MSMB1072
atgcagttaaccacgatcaagattctgccgcgcggtgcaaacgggtgggaaagtgcaacgctgaaattcggcaatcccctgacgtcgttgtttgcccccaacggcagcggtaagacaccgatcgtgcaggcgattgcgttttgccttgggttcaaaacgaaattcagagatgacatctgtgagcactgcgaggcggcagtattaactttccggcacgacgatatcgaggtcactgtccggcgcgatattcaatcggagtttcacgcgattctagagacaggtgggcaggcctttgagttttttgacgaaggcgggttttcgcggcagctgtttagcacgctgggaatgccaattcccgatctcgttggtacaaacaagcaaagaacgcagccgtacgtatcgacactgctgccggtgttctatgttcgacaggacggtggctacaacgagccatatcgggctcctgatagttttattcagaatcagtttgtagagatggttcgttttgccttcggattgaatcagcgtcactcgtatgacgcgaagcgagatctgctggaagctagggagcagctcgaggccgttcagaggcgaattgtccatcaacagaagttggtcgctaatctaagtgcggaccgggatgactcaacggaagcgtacgaggctctagtggctagagccgcgacactcacggagcagattgaccatcttcgcgaatcagtcgatgctcaaggtgcagccgcagaggctctgacggaacttcttcaggtaaaggaggagcagctcagaaagttgcgtcgtgaacatggtgagcttcgtgcgaggcttgcggggatcgaatcaattcgtgcagagattgagggtgaaatcaggacgctatcgctcaatgaggagtctaagcgagcgtttgagacgttttttgacatctgtgggaactcagaatgtggcttgttttcgacaagcaaagagtcttatggaaaaaaccttctatatctcaaagatcagatcaaggatatcgaagcaaatacgaatcgagcggagacccagattgcggtgctagaggcgcgcattgcagatcaagattcggagcggaaagcgattctttcgaagctcaaggagccagagcaaagaacgccgacgagtcagattgtccttgcggctcaggcgctgactcgtcagttacttgacgccgagcaacagcgagctacgcttgatcaaataaaagatgagcgctggaagcaagtgaggctggatgaggagcgttcgcggttgctggaccgcattgacacgttgagtgggagcggacagtccgatctcggcttcaatcgattgcgtctgcggataagggagctaaccgtgaagtggatggacatcctacacactccaaacgcctcacgtgacgtagacatcgatttggattttcgcttccggtttggcggcgaaccggtggacatcattgggggaagtacgaagagtcggctgattttggccattcatgcagcgatcttcgagcactatcttgcggacaccacacgcccgtttcgctttctaattcttgatacacctaagcaacaagaattggatagcgaagacctaaagcggtacttggacgagctggatgtggtctgtcgtgagcatcgtggtcaagttttgatttcggcgtcggagtatcggcattcgcttcgcgatggcgatcgtgaatggcttccggaatttgtaggtgaggttcagaagatgtatctgggttcgcttggtcgtaattga

SEQ ID NO: 93498 - DNA, 1068 bp, Bacillus paralicheniformis
gtgaatttaaattcttatcctagcttggaaaattacaaagcacgtgaaaatacaggttcaaggtcttcaaacagattagctatgcaaattagctttgctatgtggaagatttttgaattatatcgaaccgaagattttactgttgccatggattgtattgatgatgttgtcatatttaaaacgtcaaataaaaatcgaaccattgtgacttatcaattgaaaacaaaggattctactactggaaatttcgaattaaaaaaattaataaatgacaatgtatttctgaaaatgtatgaccatattgagaaaatagatacggatgttgaagagatatatttaataaccaataacccattaaaatttaaaaagaaaatggttcatgctgaacggattctatttgatgacttagatactgatattaaggaactaattgaagaaaatatgtctgggagcccagtttttgctgagaaaggattatcaactaagtttatatattctttgatagatatgtcatttcataatcatagagaaattagtcaaaatagattaaattctttattgatggaagaaggaatagatattagcataacagctgccgatgcactttttaatgctttgcaagatattttaacaaaaaaacaaaattatgagttcagtttacaagataaatttaatactatacttaataaaaaaagtttttcgaaaacggaatttgcatcattattagatagctcaaaaaagattaatgctgatgttctatctttcgaggatattgataacaaatataaagacagatctttaagcttgaaagaagaaagtttatacaggagagcaatggcaagtgttaaagaaaagttgaataaatctccaaatatattacaaaacataaatacagacatttatcaatttgttaaagaacaaattgatactaatgaaggattaaaaagaagtgagctagtcatgcttttgcaaagtatttttgatgacaaagtaaatcttgaactatctaaagaggaaaaagaaattctttatatgcaaaatattgaattggtcctaagggagggatga

SEQ ID NO: 93499 - DNA, 1092 bp, Bacillus paralicheniformis
atgaataaagtcataattaataagttatttatatttgatgtaattgataaaaaatccaagagtgtggattttaaggatggtattaatattattacgagtaaagggaatcagttaggtaaatcgaccataatgaagtctatttattatacattgggtgcagaagtattctttgctgacagattaaatgtaaaaagtaaaatccacatcttagagataaaagtgaatgataaaaaaattaattttattagacatggcaaagttgttgtgatacaagacgataaaagaatttttaaggcatcgagtgcttctgacttgtcacataagctacatgatatatttggattcagtgtttttatagaggacagacaaaaaaattatgtaacagctccgcctgtttttcgttatattccttattacattgaccaagaccatggttggacgtcagaattaaaatcttttgataaattaggccaatttgataaaaaaagtagggatttattattttattatcatttaaacattcttgatgagaactatggaataaagttgaaagaaaaaaaagaactagatgttttgataagtggtttaaaaacaaaaaataaagaaattttaggcttacttgcatacataagagaaaacattacagctttcaattcagaaatggatattacagcactgcaagttcaaaagaaagagatacttcataaatataaaaaatattcatatgatttgaataatatcagaagaaaacttatagagtatcaagaagaaatatataaaattgataatgtaattgataatttaaacagtactctgaaaaaaaatgataaagtaagagcacatgtaaaacatcagtttgatatagaatgtccatattgtaaggagcattttgaaatacacgctaatgacatattaaaaattaattataatattgtagatttagaagcatcaaaattagaaatgctagatataaaggtaaagttgcaggaaaaaatcaaagaagtccaaaaagaatatgaggtttatcaagctacgttgaaaactattgaagaaaaaaagttgattcagaaaatacccttgaagacatattga

SEQ ID NO: 93500 - DNA, 1068 bp, Bacillus paralicheniformis; identical to SEQ ID NO: 93498

SEQ ID NO: 93501 - DNA, 1695 bp, Bacillus paralicheniformis
atgaataaagtcataattaataagttatttatatttgatgtaattgataaaaaatccaagagtgtggattttaaggatggtattaatattattacgagtaaagggaatcagttaggtaaatcgaccataatgaagtctatttattatacattgggtgcagaagtattctttgctgacagattaaatgtaaaaagtaaaatccacatcttagagataaaagtgaatgataaaaaaattaattttattagacatggcaaagttgttgtgatacaagacgataaaagaatttttaaggcatcgagtgcttctgacttgtcacataagctacatgatatatttggattcagtgtttttatagaggacagacaaaaaaattatgtaacagctccgcctgtttttcgttatattccttattacattgaccaagaccatggttggacgtcagaattaaaatcttttgataaattaggccaatttgataaaaaaagtagggatttattattttattatcatttaaacattcttgatgagaactatggaataaagttgaaagaaaaaaaagaactagatgttttgataagtggtttaaaaacaaaaaataaagaaattttaggcttacttgcatacataagagaaaacattacagctttcaattcagaaatggatattacagcactgcaagttcaaaagaaagagatacttcataaatataaaaaatattcatatgatttgaataatatcagaagaaaacttatagagtatcaagaagaaatatataaaattgataatgtaattgataatttaaacagtactctgaaaaaaaatgataaagtaagagcacatgtaaaacatcagtttgatatagaatgtccatattgtaaggagcattttgaaatacacgctaatgacatattaaaaattaattataatattgtagatttagaagcatcaaaattagaaatgctagatataaaggtaaagttgcaggaaaaaatcaaagaagtccaaaaagaatatgaggtttatcaagctacgttgaaaactattgaagaaaaaaaagttgattcagaaaatacccttgaagacatattgaaatttaaaggattacaagaaactcaaaaacaactgaacactgagcttgtaaaaaatgtgagtgaaatagaagaagagtcgaagaacttaaaagaaataaagcgagatttaaaaaaatgggatgatgaaattgatagagcgaataatagttatagagatatcttgaatttaaatctaattagatttaatacaaaagaacactcattacctgaaaaatataatattggtaaaaacctcaaagcatctgggagtgggcaagttcgagttaatttagctagagtatattcatttataaagcttcttgaagattataaccctgacggattaaaatacccgttagtgattgactctcctaaaggtggagaacaaagtatgacaaatagtgaattgattttgagattgttgacggagaaagcgcagatttcaaaccaaattattttggctacaattgaatttgaaagtttttataatggagatattaaaaaattcaacataattactctggataatgagccatataatttattatctgctgaagactatcaagctaatcaagtaataatcgatgactttgtttctttatattttgaagcaaataaatag

SEQ ID NO: 93502 - DNA, 1071 bp, Bacillus sp. TH007
gtgaatataaattcttatcctagcttgaaaaattacaaagcacgtgaaaatacaggttcaaggtcttcaaacagattagctatgcaaattagttttgctatgtggaagatttttgaattatatcgaatcgaagattttactgttgccatggattgtattgatgatgttgtcatatttaaaacgtcaaataaatatagaaccattgtgacatatcaattgaaaacaaaggattctacaactggaaatttcgaattgaaaaaattaataaatgacaatgtttttctgaaaatgtatgaccatattgagaaaatagataaggatgttgaagagatatatttaatcaccaataacccattaaaatttaagaagaaaatggttcatgcagaacggattctatttgatgacttagatactgatattaaggaactaattaaagaaaatatgtctgggagcccagttttcgctgataaaggattatcaaccaagtttatatattctttgatagacatgtcatttcataatcatagagaaattagtcaaaatagattaaattctttattgatggaagaaggaatagatattagcataacagcagccgatgcactttttaatacgttgcaagatattttaacaaataaacaaaattatgagttcagtttacaagataaatttaatactgtacttaataaaaaaagtttttcgaaaatggaatttgcatcattattagaaagttcaaaaaagattaatgctgatgttctatctttcgaggatattgttaacaaatattataaagacagatctctaagtttaaaagaagaaagtttatataggagagcaatggcaagtgttaaagaaaagttgaataaatctccaaatatattacaaaatataaatgcagacatgtatcgatttgttaaagaacaaattgatactaatgaaggtttaatgagaagcgagctagtcatacttttgcaaagtatttttgatgacaaagtaaatcatgaattatctaaagaagaaagagaaattctttatatgcaaaatattgaaacggtcctaagggagggataa

SEQ ID NO: 93503 - DNA, 1695 bp, Bacillus sp. TH007
atgaataaagtcttaattaacaagttgtttatatttgatataattgataaaaaatccaagagtgtgacttttaaggatggaattaatattattacgagtaaagggaatcagttaggtaaatcgactataatgaagtctatttattatacattgggtgcagatgtattctttgctgacagattaaatttaaaaaataaaatccacattttagagataaaagtgaatgataaaaaaattaatttcgttagacatggtaaaattgttgtgatacaagacgataaaaaaatttttaagtcatcgagtgctactgacttgtcaaataagctacatgatatatttggattcagtgtttttatagaggacaaacaaaaaaattatgtaatagctccgcctgtttttcgttatattccttattacattgaccaagaccatggttggacatcagaattaaaatcttttgataaattaggtcaatttgataaaaaaagcagggatttattattttattatcatttaaacattcttgatgagaactatggaataacgttgaaagaaaaaaaagaactagattttttgataagtggtttaaaaacaaaaaataaagaaattttaggtttacttgcatacataagagaaaacattacagctttcaattcagaaatggatattacagcacttcaagttcaaaagaaagagatacttcataaatataaaaaatattcatacgatttgaataatattagaagaaaacttatagagtatcaagaagaaatatataaaattgataatgtaattgataatttaagcagtactctgaaaaaaaatgataaagtaagagcacatgtaaagcatcagtttgatatagaatgtccatattgtaaggagcattttgaaatacaagctaatgatatattaaaaatcaattataatattgtagatttagaagcatcaaaaatagaaatgttagatataaaggtaaagttgcaggaaaaaatcaaagaagttcaaaaagaatatgaagtttatcaagctacgttgaaaactattgaagaaaaaaaagttgattcagaaaatactcttgaagacatattgaaatttaaaggattacaagaaactcagaaacaactgaacactcagcttgtaaaaaatgtgagtgaaatagaagaagaatcgaagaacttaaaaaaaataaagagagatttaaaaaaatgggatgatgaaattggtaaagcgaataatagttatagagatatcttgaatttgaatctaatgagatttaatacaaatgaacacacattacctgaaaaatttaatattggtaaaaacctcaaagcatcagggagtgggcaagttcgagttaatttagctagagtatattcatttataaaacttcttgaagattataaccctgacggattaaaatacccgttagtgatcgactctcctaaaggtggagaacaaagtatttcaaatagtgagctaattttgacattgttgacggagaaagcgcagatttcaaaccagattattttggccacaattgattttgaaagcttttataatggagatactaaaaaattcaacataattactctgaataatgagccatataatttattatctgctgaagactatcaaactaatcaagtaataattgatgattttgtttctttatattttgaagcatgcagatag

SEQ ID NO: 93504 - DNA, 1110 bp, Citrobacter sp. MGH105
gtggctaaaaataaagcggcaaacgccggggttgatgcgttaactggttttgagtttcaaagaaactgtgcattgtatcttttgttagataatttcaattcttttatcaataaagagttctttatttgtatcgaacatcacgatgattttctattttgttataaaactgattgcttaagttatataaacgagatacatgcctatcaagcaaagaaacttagcgggaaaatatggactatcgattctaggttttctgagatggtatctaaaatactattggtgggcgaaaacttaagaaatgatgcttttgaaaaaagtgaagattataaacaccagctaacatttatatcaaatacagaaatagaattaaaatactcaccgtcaaaggctttaaaaaaagaaggtattactgagcagatattaaggattaatgagcaaaactctatctgtgcttatgatgaattacataaaaacattcagaataaaattgaagagaaagttacagatatttgtaatgaagaatcttctgttttccatcgtaaagaactaagtaacctaaaaattcagtgggtagattttccaagaacagctgcaaaacaaaaagaatcgcttattggacttatgtctagaaagttttctcatatagctgacccgaaagcagccatcgaggtaatacttgctctttttagaaatgtggaaactgtatataatcaagggcaggaaatatgtctactcgatccaacaaaaagggttgaaggcgaagatgttaagaaagttatgaatataattgattcacagcaaaaggcattcgactattggcgtgacgaagcacagcaattctcaatgaaattcagaataccacttagcatacagaaaaatcatgaaaactatatacttaactcttttgaactactcaaggatatgagtaattacgattatcaaatcattaaagactttgttagaaataatgattacacaactcaatatttttctcttcaagacgcattaactgcatatgttgataatgttagaaaatctcattctataaacctagataatattgatacattttttgcagttctgtgttcatacgttgagtgctacgattaa

SEQ ID NO: 93505 - DNA, 1764 bp, Citrobacter sp. MGH105
atgaagacaattataaaatttgatagattgtttgttgtctctgaaagtcataatttatatttcgaccaaaagttttcaaataaaataaacataataagtgggtgtaatacctcaggtaaaagtactttaatacagagtattttatttacctttggaattaacgatgttaaagatggcttgagcgaaattattcgatacaaccctacgttcagattggatttcagcatcactaaaggaggcgtagataaaaaatatataatagtaagagagcttggtagcatatatttaaaagaggatgggggaaatgtttttagttttcatggaattgactctgatggtcgagttgaacatgtgaagcttaaggagatgttatctcaattatttgattttaacatgcttttagaacagaagggtgagctaaaaaaagcatcgatagaatgcatgttcctgccttattatatttctcaatctgtagggtgggtttatttgagagagtcattctctaatcttggtttttataaagactttaaagatacgtatcttgattattatcttggcatagaaaattcttttgataaagaatatttttataaattaacaaaagagcgggcacaacttcagtcgaagatctcctcattgaataaatatagcgccgagcctcactttgttgtttctaaattactggatgaagagtttggtgatgaggctcagaagtatatagatggttatattaaattagtagcatcattagatgaagaacgtgatgtatatactggtttgtgtaataagttatccttaactaaaaatcatgtcaagatactaagaagaactaaaagaaatattaaaaaccaaaactataacaatattgatcgttgtcctgcatgtacgcaaatacttccttattccttagaagggttatatggttattatcaaaacatcaatgatactgataaactatcggagcaaataaataataaaatacaaaaaatacagtctgacattaatagttcacttgcgaagattaaaaagttagaaattgatatatcttcaaagtattcatattttcttgagaaaaaatcacaaaatttatctgtcaacacatggatcgataataaagcaaacatacgtctgttaggcaatattcatgaagagatagaagaatatacaaaaaggtctgatgaaattaaaggattaattgatgggatgggagaggagcagtctctttttgtcgagcggtttaacaaagaaaaagatttcaaggaaatatttaaaaaatatcttaatgatatgcagttgttcaatgtaacagaacctagatatacagaactttataaaataaattcatttccttttcaaggggttgaacttcataaaactgtaatgtcatatcattttgcattaaattctttaataagaaaaacagacaatatacatcgacttccatttatgcttgacgcaattcttaaggaagatatcgatgacagaaattttgatctcatactgtcgtttgtgggaaaaaatcttccgactgatactcaatcatttatatcaatgtctgagtatgctgaagataacctcttgaaagatggtaaagagataagtgcattccgaagagccaaggttaaagatattaaaaatcgatacttccctgatggtacgaatttattctttattggtgatgggaagcatgagagaacattgttatcaaaacctttggatttaaacctcgatatttttgtcgatacttgtcggcttactgaatga

SEQ ID NO: 93506 - DNA, 1059 bp, Enterococcus sp. RIT-PI-f
atggtaattgatgatgcatattcactttatgaagcagatgtttctggatccagatcaaaaaatcggttttcttatgagatttattggggaattgacaggtttttaagagagctaatgaattccgatgatttcactatggtctttgattacgtctgtgatgtagaaattcatcatcgtgatagacttgagttttttcaagtgaagtcaaaaaaagatgctggatcatatacagttagggctttaacaaaaaaagagcctttgaaacagcattccattatcgggactctatataaattgcgacataccgaaatagaaaataatatgccaaagtctaaactagctatagtttccaatcttcatttaggagtacctgataatttaaggatacctaactcagaattaacgcttgaaacaattgaagaaaagaatagaagtatctttttatcaacaatcagtgctgaatttcctgacgaggaaattgatttatcagatgtattctttataaatagtgatcttggaatttcaacagtcagagaaactatggtaggacgtgttgagtctttttttgttcaactttatagtgaatatccggttaagcctggggcgttactaactctcttaatacaagaggctttggaaaaggcaaactatgagtttccggtaaattctcgcatagaggcagtgaagaaaaaaggttttacttcagagcgatttaaacttattttgggccgttatgcagaacagtctgtttcaataatggaacaatgtaaaaaatatatacaggaagctgaaaataatcttggtaaacgccttaaatacatgacggtattaccggatgtaatatctcgtcttaaaatggattttcattggcaagagcttgaagggaaaattagagatgatatttttgagcagtcagataaacttgagtctgctcaaattttcgaacttgttagacaatatattgttatatcgtctgttacatttccattagagttttcactagaagagatagaattattatgtttgatagttatgattaaagtggaggagagtttataa

SEQ ID NO: 93507 - DNA, 1695 bp, Enterococcus sp. RIT-PI-f
atgtcaaagaagttgatagtaaataatgtgtatctattttcaacggcaactcaaaaagctaaaaaagtatccttcacatctggtataaatattgttacttcggatcaagaagatggaaataaaaaaggcaaatcattaattctgaaaagtgtctattatgcattaggtgcagatgtatattttgatgataacctgaaaaaagatacagttacttttgtagttgattttacaatcgatgatacaagatataccattttacgtttggggcgtttctttaagttatttgatgcagaacataacttattagttggtacagataagagagacgagctgtctgaagtattgtatccattgtttgggttttctgtctatcttccgtcgagaaaagaaaatgataacaaattgattatcgctccaccagcatttgcatatatgctaagttttacggatcaagatcatatggacggaagtaagctcggctcattcactggcttaggccagtttatcaacttcaaagaaccactattatatactcattttgggctgtttaataaagactattttgacttgaaactaaaacaggacaatttgaatgaaaagcttaagttgagtgaacaagaactgacaactattgcaaatatgcttaagaaaatcgagcaagaaatccctgaagcaatccctgaagatgttgagtcactgcggaaagaattagatcgtcaagaaagtgagtatcgtgctatctattctgacttgcagaaaacaaagaatgaattgtctgatctaaggagtaactatgtgaaaattactaaaacattagaggatgttagtattagaaagaggcatgaagaaaaagatgttaaacaggtacttcatgaacatatatgtcctttatgtcgccaagatcttgaagatacacttgatgttagaataatcaaaaatattaacattgaagatttatctcaggtaagtttagagttacaaagttttatatcttcagctaagagaaaaattgaagaaaaagaaagtgtttataaagtccatttaaaaagactaaataaatataataaaattttgaaaggtactaaggaaagtcaaaatgaaattttgaagattcagggctattctgacctaaaaactaagctcgaaggggaatggtcagacgaaaattctaatcataaagagctagtcgctgaagctaaagttttaacgaaaaagttaaaagaatattcgaagaaaaagaaaggtgtaaattctttctactttaagtctatgaaacaagatattatcaaatttggtctagaagaagtacatgataaatctattgaaaatattaaaaatagtgtaaaagctacagggagtaatcagccaatcgtaacagttatttggtatatgaacctgcttaaactgaaaaatgaattttttcctgaagccataaaatttccactggttatggatagtcccaaccatgctgaactagacgatcagaaaaaggaaactctttttgagtatatctttgcaaatattcccttagatactcaatgtattatttcaacattaggatttaacagagaagactatgatacagatttggatttaaatttaatcattctggaaaatgagaagtatcaacttatgaatacagatgattatcaagataataaagattatcttaataaattaattgataagcaatag

SEQ ID NO: 93508 - DNA, 1077 bp, Pseudomonadaceae bacterium E5571
atggtaaatagtaattctggtgtagagggtggttctggctattcatttcagcgttgctgtgttgtttttctattatttgaagactatgaaaagttaaacatagaggattactttatttgcttagagcaccatgaagattttctattcgcatttttggacgaaaataggcatttaaaacaaattgatacctatcaagcaaaaaaatcaagagatgactggaaaacagatagtgacctttgtgaaataattggaaaaatgacgatggtgggaaaagagcttgtcaacgatcctcatgacaagtctaataattatcaacataccctaaattttctaactaatcgaaatatattattaacaagtaaacaagaaaaaggtgctaaacaagataaagtcaaaatccaagtttcaaaccgtcgaaaaaactattctgatttaacagagaaaattaagaaaaatatagaaccaagaatttgccagtcaatactcgagatcactcaattaaagaatgtttattttcaatatattgatttagcacaaagctacaagagctggcagagagagctaaaaggcttatccatggagcactttggtcaggaagtgaatgatcatgaagctgttatttcaacattgatgcgattattggaagaagcagagcaaacatataatgataacaataaagttctattatctgacctaagcaaaagagtaactaaagataaaataagtgaaactttcaatatgtttactgtaagtaaaaagtcttttgatttttggcgaaagtattcggaccagatttcaacccaattagaactaaaactccctatacggagaagagcgcaagaactgcttgaaaattgttttgatttttttaaggaccttcagcaagttgaatatcgtaagatttacaagtttgttgaaactagaacagatattgacgagaaccatatctgtgaagctgattgtattgtggatttatatcactgttatcaacgtgaattccagccaagattagaaaactacatggtggcattcgctgtgattgcagcatatgtagagacaagagggatgtatgtctaa

SEQ ID NO: 93509 - DNA, 1746 bp, Pseudomonadaceae bacterium E5571
atgtctaaattaaacttaaaaagcttattggtttattctcctaatgatgagaaaggattttacacagagtttagtgaatcagtaaatattattcacggacgaaatacatctggcaaaagcacgcttatccagtcaattatatatgctataggtataaatgactcaaaagataatttgaatgatattaatagcggtgatgttttttttagacttgactgtgttttagaaaaagctggggaaagttgtaatctggtatttatacgttctgatgatactttggtcttgcaaaaaggtaatgagccagctattagatttgatggcattaacagtaacaattcttttgagtatggaaggtataaagaacttctttcaaaattaattggcttcaatttagtcctacaaaaacaatctgaattagtaagtgctccgttagaagcagcactgttgccgtattatgtatctcaatctgtgggatgggtttatatacgtgagtctattggagattataggttctataaggattttaaatttgattacttggattactattgtggtattgaaagtggtcatgaaagaataaaaaaatatgatcttgagaaagaaaaaaaggaattaaactttgagttgaagcaacttgattcatatgaggtcaaaaatgcagatctgaaagtgtcaaagttacttgatgagcgattcaaaggcgaggctgaaaattatctagaaggctatcaaagtttaaacaaagagttatcagataaagaggcagaacatacgaaattatgtaacaaatcaagcatgttaagaggtaggcaaaaagtattatctcaaataataactaacataaaaaatcaaaggccaaaaattgatcagtgcccaacatgtgatcaacacttaccgggcgatttaaaagagttttataagtatagccaagatgttaatgatgccttaaaagaaaaggatagagtaaaagagaatattaaaagcaacgcttcgaaattgaattctattgagaagagtttaacctatttgagagaaaaaatagagaatgaatacggggttttgcgacgcttaaaatctgaaaatattacatttgattcttggcttaatcacaatgccaacttacgaatgttaaaaaacatctctatcaagaaagctgcatgtgaaaaaaggattcacggaataaataatgacatagaaaagcttggaagtggtgttgatattgactccttgagaaaagccaaggaaagagagtttctttctatatttaaacgtaaggcttccgcactaggtgttaagctaccaaaagaaaccaaatatcaggatctgtattctataaattcattcccgtaccaaggggtggagttgcaccagttgctaatggcctataatttttcattctacgaaatggtcataaaagcaccagcaatccatagctttccatttctactagatgctgtttttaaagaagatattgattctgagagccgaagtaatatatttaaattcctttcgcaagaaactaaatctagtgggcaagtggttttttctgtggctgagtataagggggatgaaacatcatctaatcctcttttcaatgttgatgccattaaaaaggaatattttcctgaagacacaaaattaatatgtattggtgatagtaaatctaaacgggcatttttatcaaaagcagccttaatagatagctcattagttgacaatacaatgaggttgttggaaacagtctaa

SEQ ID NO: 93510 - DNA, 1122 bp, Rheinheimera sp. EpRS3
ttgagtacaagaaaaaattcagctaactctggtatagatgccttacttggtttcgagtttcagcgaaattgtgcattatatttgcttctaagcgactacgatagcttcaaggacagagagttcttcctaagtattgagcaccatgatgattttctttattgctatagaactggttgtagaagcaatatagaagaagttcgttcctaccaagccaagaaactgtcaggtaacgtttggaaaattgatgaaaggttctccgaagtaatagcgaaaattcttgaggttggaaacagactaagagacgatccatcaccaaaatgccatacttacacgcatgaactgacattcatttcgaactctgatattgagcttaaatttcggcctaataaaaaggagaaagatgctggaaaaaaagaactaactcatgtattcaatgaacagaattgtagacataactatgattctatacccgatgatatcaaatattttctcagcaaaaaggtagaaaacttttgcaagagtaatggagcggaatacttcgagtcagaactgaacaaccttcacattcaatgggtcgattttccaagaacaaaacagactcaaaaagactgtctcgttggcctaatgagtagaaagttttcgcacgtatcggattcagctgcagcagttgaactacttttgacaatgttcagagaggttgaagcgacatacaaccaaggtaaggttattacgttactcgacagttcgaaaagagtcgaaggcgatgatatcaaaaaagctatcgacattattgaaacagagcaaaagactttccagctttggagagaatattccgcagagttagctcgcaagtttcgcatccctattggcatccaaaacagttacgaaaactatataaggaatacattcgaattattaaaagatatgacgaataatgagcatcaaatcatcaaaaattttgtccatcaaaatgattactcgatgaatcactacagtcatagcaaaatgtttgaagcctacgtttctgatataagaggtaaattcaacctcaacctcaaagagatcgatattttcttcacagctttatgcgcttttgttgaacaccatggagaggccatttaa

SEQ ID NO: 93511 - DNA, 1776 bp, Rheinheimera sp. EpRS3
atgaaaacaacaataacgttcgacaaattatttgtgagttcagagtctcacaaccgatgtttcagcgaagagttctctccaagtgttaacttaataagcggtagaaatacatcaggtaaaagctcattaattcagagcttaatgtatacgtttggtgttaacgatgtgagggaaagcctttctgagattcttacttatcaaccaaccttccgtgttgactttacgataaaaagtaatcaatcaacgcaagaatactgcatagtcagagattccaaatcaatatacataaaagaacctaagggtagaattatcccttttcatggagtgaacgcagacaatagcgctgaacacgtgaagctaaaagactacataagagatttagttggtttctctttggtccttgaacaaaaaggtgaacttaagtccgcgccgcttgaaagcatgttcttgccttactatatttctcaatcagtcggctgggtttacttacgtgaatcattctccaatctccagtattacagaggatttcaagaggactacttggattattatctcggtgtaagtaatagttttgaccgagtcgaacataggaatcttagtaaagaaaaagatcgactatcaaatgatattagcaatttaaaacgttacagcaaaaaatctgaattccaattttctaacttagtagatgagactttcggaattgaagccgaagaatacgtcgaaaaatatgtacaaaaatcgagtgctcttgaggaagaacgcaataaatatattaggttgtgcaatgaactttctttgctgcaaaatcaccataaaatattgaagaggacaaaaataaatatcaagagccaaaattataacgatattgatagatgtcctgcatgtactcagattttatcttactctcttgaaggactgtatagtcattatcagaaatacaacgacactattgagcttgaatcacatatcacacagaagcttattgataagatgtctagcatcaatacctctaaaaagaatattgataaaatcactacagaaatcaatgatgattacggtgtcctattgaaaaaaaatattgatggacttacattttctcagtgggttgaaaacaaagctaacatcaccctttacaagaagatgcaggaagatattagttcttatcaaaaaaaactagaggaagtaaaagagtcattagcttcaatgggcaccgagcaagaaacattttcagtacgcgcgctcagagaaagaacgtttagggaaatttttacaaactacacaggacaactagcactaaaaccgttgacagacccaagatacctagacttgtacaaaattcattcgttccctcgacaaggtgttgagttacataaaacagtcatggcatatcatttttctttaaacgcaatgatagaaaaagcaggtgtagctcatcgattcccatttttactcgatgccatactcaaagaagacatagataaaacgaatttagaaaatattctttctttcgttggtaagaacctgccaaacgatacacaaacatttgtatccatatctgaacatattaacgactctgacgataacaaagaaaaagcgcaggatacaaaagcaattcagacgatccgagttaaagatgcaatgaactcttactttcctcaaggcacaaaacttatttacattggttgcggaaaaattgaacgcggatttctttctcagtcgctggataactattcagatctatataacgatactattgagattactgctatccagtaa

SEQ ID NO: 93512 - DNA, 1164 bp, Methylobacterium sp. Leaf112
atggcggccgacgctctgatcgaactgatcgacgtgttcagcgaccccgacttgatagaaaccggcggcgggcacgggcagaaaggcgtcgagtatcagagaaactgggctgtcgttcagatgttcgtcctcgaagagggcagtgcgcctgattttctcttcctgttcgaagcgattcaagacatcgctgtcctggactcgcctaacgccccaacgagaattgacctctatcagatcaagaagaaggaccgcggcgagtggtcttgggcgggcctaacgaagctgcaccaaccgcccgacccggcaaagcctgccaagacaaagggcaagccgacgtcgaagccgctcgctgatgtaggggacagcccgatcggcaaactgcatgcggccgtccacgccttcagtcagctcgcaagcgccggtcgcttcatttccaatgccggctgcgacatcgacatggcggacggctcgaacgctgccacctcactacccgtcgcgctcgaagctcttccggcgcacttcagtaacctgctgacatcagcgctggcctcgctgcacaagccaggcaccgcgccccctgatctatccagacttgttctggaaaaggcggaccttcccgtcgacagcacggctgtcttcaccgttggaaaggcgcactcctttctcgtacgaagaagtcccaaacatgcggggcaggcccagtcgtttgtggacagccttttagcgaaaatcggccctctcggcgctaagactgcgacgtgttcaactttcgaaggcatgaaatcgcagcatggatactctcgagacgattttatcgctgccctagggacgctcgaagaggttgtcgacgtcgatttctttctcaatgcctggctgacccagctgcagcaggagggcatgggtatcatcgaaatgaccagcattcgcgctgccgtcgctgcgatctaccgaaggcaagttatgggcaaaatgctgccggaggaaatacaaattgctgctgcgtgcgacgagtggctaatggatcataacgattcatcgaagcttatgccgttcttcaaagatgccctcgcgcatttgtccggtatattcccattgaaaaaatcggcggaactacaagcccattttgctataagagcgataaacaaatgcgtggccctgaactga

SEQ ID NO: 93513 - DNA, 1623 bp, Methylobacterium sp. Leaf112
gtggtggggcgaaatcacacgggcaaatcaagtctgattaagtcgctgtttacggcgcttggcgcgagacccgagggcagccttgatcgttgggacaagaatgcggtcgcgctcgtccgtttttccgtgaatggcgagagctatcatgcccttcagcagcaatcctaccgggccctcttcacggcggacggtcgatgtctgctcgcgaccgctgccgcctcggagtggggtgcggcattcgccgatctgatcggcttcaaccttgtgctgaccggcagaaatcaggaagccgttggcgccgatgcccgcgcgtttttcctgccgttctacatcaatcaagacggtagttggcatgctaattggtccacctttcccagcatcaagcaatacaaggcgcccgttcagcctattcttgaatatttcacgggggtaaagccgccgaaatattatgagacgagcgctctgagagatattgcccaagctgcactccgcgagttgcaacgcgaacagaagctcgtgttgcatgtgcgggagcgcttcgggaagacacttcctttaagcggtcctaagacagttcccgacatattcgagcaggatgtctcccggcttacggaagaggtgacgcgcctcaatcggcaacaggaggagctgcgcaacgtccaggtccgagatcaggaagttttcgacagcctgcagctacaggtccagatggcccgggaggcgcttcgaacctacgatggcgacgcctcgttcctgcgcaccgaaccgcacgacacgctcacctgtccgacatgcggcgcggagcacaatagaacttttttggacatactgcactacgcggaagatgcacgagtccttcgagagctagttatccgtcttcaggctgattccggcaaagttggtaaagagcttgagagaacacgaaggcgcttgcatgagttagaccgaagctactgggacatatcacaagtgctggaagtccggcgcggcgacctaaaattcgatgatgtggtcaagagtatgggtgcggaagtcgcctttgtggcgttcgaaaatgaactacgaggcttgaaagcgcaaattgacgagaagcttagcgccatcgaaatttatgaagccaaactgaaggagctgacaagccgcaaacgttcgaaggatatactgggtctttttagatcttcgtacgctcaggcacgggtcgctttgaacctaccgatcgtggacaccaagaagctgcgtctgaccagtcgacctgacgtgtcgggtagtggcggtcccaggtcgatccttgcgtattatgctgcattgtgggcaacgtcgtttggcgaatacgggtctttcgtggtgcccctagtgatcgactcccctcagcagcagggacaggatgagactaacctaccgaagatgatcgaatacgtatcccgaaacttgccagaacattcgcaaatcatccttggcatcgaagctgccacatcggaaaaattcgatcacgttatagatctgagcgagccctatcaacttcttaaggagggcgaatacgcttccgttaacgctgttgttgccccttatatcgaacaaatgtacgcaagtctcttcagcggaagcgaagaacaggcgagatga

SEQ ID NO: 93514 - DNA, 1059 bp, Rhizobium sp. Leaf453
atgggcgtagtcgagaagttaaaacaagaagcgaagcgcgaggacggcggcgcggtactgaccgagcgcctcgactaccagtatgcttggggaatccaacggatgctcgcgcttcacgtcagcgatcaatcctatgcattcttgttcgaatcccacgacgacatcctagaactcgaccacgaggcgacgccgaagaaggttgtcttctatcaggtgaaaacgcgcaagagcggtaactggacggtaagccggttcaccgagcggaagaaggcgaaggacggcaacgggcacggtgcatccgtcgcgggaaggatgttcgataacatccggcgcttttcgacgtgtatagaccgtgcggtaatagtcacgaacatgcccatgcccaaactcagccgggatgtcggcgagcattgcctgacaacactcgacaaggattcgttgaaagagctcgggatcgcaatgagtgccgaagacgccgcattcgtgacggcgacgcacctgccgtactaccatctgaactacagtcccctccatttcgacaacgcgcatcacaccgtcgtcggacaagtggccgacatcctttttaaacgcacgggaagcgaacgcggcgcgaagacgttcttcgacgccctgtccggcgaatgcaggcggaaggcgaagccgcagcccgcagttcgtactttgacggggttcgacgccgcgcacgtcctcaagaggtccgacgtcgaatccttcctcggcatacatggagagcatacggcgcctagctgggcgaatgtagccccgtttctccagccgcttgggttcgtcagggtcacggcaatcatgaaggcatgggaccgctacgagatcgagcgcagaacgcgctgggaaacgctgcgacatgtcgcgccgaagatcgcgaccgctattgaaccgattttcaatgggcgtcacgatttcgtcgtagctctgcaggaggccgtcgtcgaagttagggatgtggtgcaggcctggtcgccgactgccgacgacgccgcgatcgccgccatgatcctctacgagtaccaacgccaatga

SEQ ID NO: 93515 - DNA, 1689 bp, Rhizobium sp. Leaf453
atgaaacgcttgagcttcgaaaggctggaattgttgtcgctgaccgaaaggaaggcacggacgatagaattccacccgaagctgacgatcatccagggaatgaacggggtcggtaagtcctctgtcatcaagagcctctactggacgctaggtgcggctccacaggcgatacatcgcgactgggcggccgcgaacgtcaagagcagacttcatatgcggatcgacgatgccgcctattccgtcgtcagggacggccgtcaactggccatgttcgatgtcgacggaaagaagctgatctccactaacagtatcacgcacgaattcggaccgtttcttgcagacaagctcgacttcggtctgaccctgttgaacaggcagaacgaacccgagatacctccgcctgcctatgcgtttctacctttttacatggatcaggacggaggatgggagcgcccgctctcgtcgttcgacaggctgacgcaatatgcgaacttcaggcgggccatcatcgaatatcattcgggtatcaagcccaacgagttctacaagatctcggctgaaaggacagtggccgcacggcttaagtccgaggctctatccgaaaggaacacggtagccggcgtcatcgccaagcttggtctcgatccggtcttccagggtatcgagctttctgcctacgctcacgacgcagcggtcgaggaccttctcgcccgcctgacggaactgcgcgacgcacggcaacggcgcgcggcgaaactcgccgcggtggtcgacgagcggctccttctggaagaacagatcgagctggcccgcgctgcggcgagagaactcggagccgatgcgaactgggcggcctcggacggacgcgagacgattgcctgcccgacatgcggcacggatcatcggaacgatttcaggcaccgtttctcgatcctcgcagacagggatcagtgcttcgaattcgtagcaagctccctcgacaagatcgacgatctcgcgaagaaggcgcgcgacgtcgaaaaggggatggtttctaccgaccgcattatcgctgaagtccagtcgacgctggaagtcgaacgtgaacgagtcacgctcaaggaggtgatcgagaacgagggccgtcggcaggccatgtcgcttttcaacgagcagatttccgagctcgacgagaagatagggactttcgaggcgtccatcgtcgagatggaagcggctctcaaggaattcaacaaacggcaacatcgagagcagcgcgagcggttctatgccgaaaggatgcgcagctatatcgacaagctgaatgtgctgaatcccgactacgacgcgatatccaaaatcaccgggcgcattgtcgagaccggcagcgagcagcctcgcctgcttctggcgtatgaactcgcgctgcttgcgaccattcaggagtactcgaccgcattctctgcaccaatggtcatcgacagtccgaaccagcaggatcaggacgacaggaacgcgcggtccatgctttcgctgatcatcgattcccgtcatcccaagggtcagacgatcctcgggacggtttcaatgcacggcattgatccgggcgacgccagcgtcatcgaatttaccgacaagcgatcggtgctacaaaacagcgaattcgaagtcgtctcgggttccttgaggcccgtgcttgagacgctctga

SEQ ID NO: 93516 - DNA, 990 bp, Rhizobium sp. Root1204
atggcgctggttctcgacctcttcagtcagggcaaggaattcgtcgctttgttcgatcatcacgacgacctcgtcgtattcgtcggggaggccgaggactccgaactatccttctaccaagtgaaatcgagcagcgaactcacatggacgccaaagcggctcgccaggcgaagcccacagggcgagctgccgaaatccatcgtcggcaaggcctactacaatgtcgcgcagttcgggccggaaattcgacgggcgtcaattttatccaatcggccgctgagcgctaccctagcgacggctaccaagtccgacttgcacgatggcgaactttccgttgcagatctctgctccgccgatcaggacaccctgatcaagtcgcttgaggcggacttccccaccggcttcgacaagaccgacacgacgctcctcacgttccagcgcgtgccgttcgacctcgaaagctatcgctccacggtgctcggtaggatcgtcacgatgctggaagaactcgacccggatttcgtagcggtctccagccccttctatacggccctcctttccgcggcgggcgagtgcaccggcaacaagacgaagtcggcgacggtcgaggaactgcgcaggcgcgtcgccctcgatcgagaggcgatcagccgtctgatcgtccgggttcaaagcaggtcaaaaaatctggtcgaatggtggccggccgtgaatgacgaacttgctgccgccggggtgcgcgcgatgcagatccagcgcatcaagatcaggtgcatgtcctacgtggacgctcgtcgggcaggcgacagaactgctgccaagctgaacaaggcgatcggcgacgccatcagcaaaactgcggtcagcggcatggacagcgtgctcgaggcggctgtagctttgaagggccacggtctcgtggagcccgcgtccgagctctacgatctccagtccgcgatgatcgtcgaactgatggaagccatgacatga

SEQ ID NO: 93517 - DNA, 1569 bp, Rhizobium sp. Root1204
atgaagagcctgtacgaggctctgggggcgacgccgaacaagattgacgaccgctggaagagcgccaacgtcgcaagctgtctcgaattcgaattcgcgggcgagacctggttctcggtcaaggcgcacggagtccactcgctcttcgacgacaagggcgtcaggcggttctggggccagcgcctggtcaaggactgggggccgaagctagccgagttcttcggcttcaagctggagatggtggacaaggacggagaaaccctgacgccgccgcccgcgtatctgttcgcaccgttctacatcgaccaggacggaagctgggacaacacctgggtttccttccgcaaggacttctacctgcccgaaagcgcggcaacactggccgattatcattccggcatacgaccggacggctactacgccgccaaggccgaactgaccaaggagaagatcgtactctccagcctggagaccgccgtcgagacgctccgccaggcgatgacccagatcgaggaaatcgaaggcactacgccgacctacgacctgcaggaattcgcaagcgagtgcgacgacctcgtcgcggagagcgaacggcttctcgtactgcaggcggaacatcgccggacggtatccgacctgcacgaggaatcccatctcgtcagggctgaggcggtgcttcttaagaatgctctcaacgaaatgcggggcgagttcgaacttgcgtcctcgttgccgcggcaggttgagtgcccgacctgtggtcacgagtaccagaattcccttgcggaaagattcgcgctgatcgcggacgagggggtcctgtccaaggccctgaccgacgcccagtcaaagctggagagactggtcgaaaaggaacgagccgagcgcggcaagctcgatgcgatcagcacaagcattgcacgcgtccagaagatcctcgacacccggaagcagtcgctttcgctcaacgacgtgctcgtcgcggctggcaagaccgaggccgccaagctccttcgggtgtcgttgaacgagaagatcgtcgcggccgacggctcccgcaccagggccgacggccttcgctcctcgatgaacgagttcacggacagaacgcgcacgtcggagatcagaaagttctatcgcacccggctttcgatgtactcgcaggaactggacgtccacctcgacgatccggacaagcagtccatcgtttctatcaacgtggcgcggggaagcgagggcccacgagcgcttctcgcgtattactacgccttcctccacaccaagatggctttcacgacgaacgtcaggttccccgtcgtgatcgactctccgaaccagcaagggcaggacaaggtccatcttccccagatggtgaagttcatttttgatcacgttcccggcgaagcccagactatcgtggcgaccgaagacgcttcgggcctcgagttcgaaggtgtcaccatcgccacctacggcgaagccaagcgacaggtccttcgcgaaaacgaattcgaccgagtgaaggccgtcttcgatccgttcttccagaagatactcgcgatggattga

SEQ ID NO: 93518 - DNA, 1167 bp, Acidovorax sp. Root275
atggaccttatccatgagaaggcgccgcgcgaagctgttggtcgggacaccatggtgcgattccgaatgcagtttcaagcagcagcgttcgcggcgctcgaaatactgagcggaaaagaagtcgaccgcgtctactgcgactaccacgacgatttcgtcgtgcgcaggaccgttgctggcgtagtcgagtaccacttctttcaggtcaagaccaaaggcagggccaaccagcaatgggacatcgatggggtctttgctcttaagaagacgggtgaactcgacactgctgaaaagttggaggcgattcgaagcagcatcgcaggcaagctcttcgttcacactgtggagttcggcgaccaatgtcgggaagtcacggttctcagcaatgtgcacttcaaggacgaagttcacaacctcgtcgcagacctcgctgctggcacgtccagcaagaagtacacgcgtcaactcatcgaaaagttcgcagccattgtttcccccaaccaaccgctatcgcctgaacaggttgaagccgctcgacagaagcttacgttgctacctggcgtgcagtacatcggtgacaccctcgaagccttcggtattgctgcacataacgccatctggaagcattccgagattgagttgcatcaacacgaggttgagcggatagctaggagcttggtgactcttgtcgaggagaagtcctgcgcgccgatcaacgggctgtccaagactgacatcgatttggcgactggagtcggtcttgaggacctgcttcaggttctgagcatctccactcaggtgtaccagacactgcaacaagggggagacccggctgcgatcaaggccgcgtcagtccttcagcgaaagctgaaggaggctggtgccactgagccaatgatcgaggcggcctcgcgagcgaaggtttcctgggatgtgtggtttagaagcgcgcggcacacatttccggacttcaccttcaacctcttgctcgacgaaatcgacaagaagtgcaaggcgtggctccttggcggcggtgccttggccgacctcgagaacttcgtccaagagattttggattcgtccataggcaagaagttttcggcgttggacacagacctagtcttcggcggcttctgcgccaccatcgttaggagggcgacgcgatga

SEQ ID NO: 93519 - DNA, 1824 bp, Acidovorax sp. Root275
ttgaggctgaagtcactgcaggtcgagcccttgggcgaaggaggttggggaagcccgctcctggagtttgggcaccggaccacgatgctcttcgcggcgaacggcagtggaaaatcacctgtcgtgcgtatgcttgcttccgctctggggtttcccaacaacttccgggcggaaattcttgcgaagtgcaacgccgtcgtcttgcaggccgaagtggaggagaagcagctcgcgatccggcgttcccttggggccgagaacgggatcttctatgccacgattgactttgatggtgagcaaactgcgcaccattccgaggcatcattctcggctgcgcttttccacttgctcgggctgaagccaccgcgactggtgtcgaccaaaggtgaggaaacgaagccctacatcgcgactctgctgccgctcttctatttgatccagggccacgggtactcagctgcctaccgcgcgcccagctccttcatcacggatcagtttgtggagatggtgcggttcgcgttcggtctgaatccaaagcactcgttcgaagtcaagaagtcgatcatagaagagcgaagtgctttggaggcgcagacccgcaagatcgtcgctgcgcaacgcgtgcttgagtatcagagccgcggcgtggacaacagcgatgcaaatcagtcggcgctgcaactgagctcagagaatctgacgcagcagatcgacgggctacgcgtatcggtggacgccaagggcagcgcgagctcgacactgacggaactgctgcgccagaaggacgtgcaaatccgggcacgccagttggagctcttcgaactgcagaatcgggtcgcgggcatcgagaccattcgtgcggagatcgatggcgaagtcaaaactcttggcctaaacgaagaggctcttggcgtcttcaagtctttccaggaaatctgccgtgctccgaactgcgggctgttccttggaagcgccgagtcgtacggaaagaacctgctgtatctgaaggatcaaatcaaagaccttgagcgcaacagtcagcgtgccgaaattcgtgttgagcagttggaggagcgccttgaggagctaggtgcggagcgccagactctcgtcgacaaccttgaatcgccgagcgcttctggcttcgaccaactagtgacggctgtacaaaccttgaccaagcaacttgtgggtgttcagggcgaactggcccgaatcgcggccgtgaagaacgagcgtttgaagcttttcacactggagcaagaacgagaccgcattcaggaccgcattgaagggctcacgaacacgggaagagctgaccacgcgttcaacgaccttcgacggagactgcgtgagctgaccgtgaaatggatggacatgctggataccaccagcgtgtcaaggaacgtagacatcgacttgaacttgcggttcacctttggaggagaaacgctggagaccattggcagcggcggcaccagtagtaccacgagccgactagtcctcgccattcacgcagcgctgttggaagcctatctcgccgacaaaacacgcccgttccgcttcctgattctggacacgccgaagcaggacgaacttcacacagcagacttagcaaggtacctcacagagctagagaagatgtgtgaggcgaatgacgcgcagcttctcttctcctccacagaatacgatcacccgaccgcgaagcaggacaggcgctggcttccaaagtaccgagggccggagaagccgatgtaccttgggaagcggactgacctgttgcccggggatgtggccgggcgctttcctgcagatggagcttga

SEQ ID NO: 93520 - DNA, 1281 bp, Variovorax sp. Root434
atgaccaacgcgcgcgcagacacggagccgagcctgaacgatgtgctttcgctgttcaaggactacagcggggacgaaacgggcggtatccatgctgtacgcggattcagcttccagatctggctcgcagtgctggaggtgctgaaggcccacgcgacgggcgaggactacgccgtggtgcttgagtggcagcaagacatcgcggtgctgaattcgtcgagtcagcccagcaacgtccgatttatccaggtcaagaagaacgagtcctcgcaccgctggacgttgcatggcctattggccgccacggccgcagaggaaactttggtcaaggacacggcggtcacgaacaagacgatcagcggcagcgcgttacctacagcggtgaagacgaaggtaaagaaggccgtgccctccacgctggccaagctctacttccaccgtcggcgcttcagcgcactcgctcaacccgcgtcgctggtgttcgcctcgaacgcgccgttctacgtcggtatcggcgacgacgacaaagacgagaccgtcgatgaagtcgaactcgacgagctcacgcccgaagccgtgaccaaggtcgagagtgccttgcgcaaacagctcgagattccaacggacgaagtggtcaacttggaagacttcatcctgcgaatcaccaactgcccgcccgatgaaggacacaagttcgtcatcggcgaactcgtggagctctgccaaaacgacaaaatgggcctcgaggtgaaggcgccgtttgtagctgtgtgcttggtcgcttcgtatgttaaacagcgagctggaaaaggctcctattcaaaggactttgccaagctactcagccgcgcggtcacacgaacggacgtcactcattatttcgcggccgcgaacgacgcgcatgtccggccccaagcgctagttgagcaaatcatcgcgcgtttgaacgccgaactggccgacttcgagatggtcaagacgatgcagttggcgacgagctccgcatgcgccgaagtaaccaaccgcgcgggcgtcgtctggccatcggctgaggcgctggtacaacttgctgcgagtaccgacaactacaaggcacgcggtcacatcaaggaccgcctgccagcttggctggcagactttcgagcgttgaacattcaagacgcacggctgttcaacgatggctttctatattgtttgatggcgatgattctcaatgatgcacaaccactccgacacctttcagcttctgcgactggtccgcaacctgaggctgaagaatga

SEQ ID NO: 93521 - DNA, 1794 bp, Variovorax sp. Root434
atgaaccgacccgtagtgttcaacgcgctctggatactgtccgaaaaagacgcgagcgcccgatatctgacgttcaacgcggggaagaatctcctcgcgggaggtaacgacaccggcaagtcgcgagtcctaaaacaccttgtctgggcgctcggctgcgagccggcccgacgtgccacgggcgacttcgattcgaacgtggtggcttcggtggacgtttctatcgggaatcgagcactgacgttcgtacggcagaaccgccgtcgtgcggccttcgatgacctcggcctgctgcttttcgccacggagtcggcatcggcgtgggcccagttcttcgcggagacgttcgacttcccgctcaagctgcagcgccatgaggaaggtaagttcgacttcgccggaccgagctacgccctgctaccgttctacgtcgaccaagacaacggctgggggacgaagtgggcgaccttcacggatctaactcagttcgcgaattggcagacctcggtgttcaactcgttcaccggcctaaagcccgcagcctacgtccgcagccagttgcagcgagacgaagcggcacatcgactgaagatagccaaggctgagtccaagcttcaagactcatcgtatcaacgggtggtcgccatgctgccgtcggagacgacggccatcgacgagacgcagttcgcccacgaactacgagcgctttccgagcaagcccagacgcttcgcgaggaacaagacaaggttcggacgggcctggtagctctggctcaggagcgccagcagaggatcggcgagctgaaccttgcgctggcctcggaacgggaactggtggaagaccaagcgttcctggcaggctacaaggatgatgcaccgctcgtgtgcccgacatgctcgcatgtccacaccacgacgttctatgcgcgccaagcactggcgcaggacactcaagacatccacgaggtcgtgattcgcctgcaggccgattcagaaaagctacgcgccaaggaattggcgatgcagtcggacctggattccgtcgccgcccggcttcgaacgctaaatgattcgctcaacgtcaatcgggaaggccggtcggttgcggacgtcgtcgtcgctaagagcttgtccacactcaagcaagcttacgaccagacccgtcatgacctggcagcagagatcgacacactggccgcgcgcaagcaagaactcaacgacgagcttgcggcgctaacggacaagggacgcgagaagcgcatcaaagagtttttctctgagaagctggtttccatcgctgaccagctggacatcaacaaggccgaaatctcgtcgaaggtcaaactcagctcgcggtcaccaagcgcgagcgggagcaatgcaccgcgcgccgtgctcgcgatgcacctgacgctgctgtcatcccatcacgagttcggcgaaggcccgacatttccgttgatcgtggacacgccccagcagtcgggtcaagacccgaagagcctgggtcgcatgcttagcgccatcctcggggacaccacgaatggccagacgatggtcgctactgaatcgatacctgagggctggcagccgccacctggatgcaaggtgctgaacttcgaggacaagcgccgcttgctgcaagaagaccagttccgcgatggtgtgcatgcgctgagctacatggtcacgaccatgcgagaagccatcttgacggccggctcacgcaacgaagaggacaccgagggcaccgttgcgccccccgatgagatcgacgaagaagacgaggactag

SEQ ID NO: 93522 - DNA, 1245 bp, Acidovorax sp. Root70
atgaccagtggtgagcaacccagcttattcgacgtcgcatccctatttagagactacagcggcgatgaatccggaggcgtccatgccatccgtggcttcagcttccaagtgtggcaagccgtccttgaggctctgggcgcacatgccactggcgaagattacgcagtcatcatggagtggcagcaagacatcgccttgctggattcctcaactgcccccacgaaagtcactttcaagcagctcaagaagaatgagtcttcctcgcattggacactgccggcgctcctgaacccgcccgacgagaaaatagtggccctgcccgcagccggcgcgaccaaaccgaagcccaagaggaaaagcacgcgctcagctgggaaggtgtcggtcctggcaaagctctacttccatcgcaggcgttttggacaggtcgcgccgacgcggctcgtctttgcttccaacgcgccgctgtacgtcgaggcggacgatggcagcaaacagaccctatcgaagactgcgttctccgcgttgcctgcggcaacgcaaaccaaggtcagcacggcactgcgcacccagctggagattccagcgagtgaagccatcgaccttgattgcatcacctttgaggccacaaactgcccgctcgagcatgcacacaagtacgctatcggcgaactcgttgagcattgtcagctcggcaagattcagccgctggtcacagcaccttttgtggccgtctgcctgattgcgtcctatatccaacagcgcgcaggttcggcatcgtttgccaaggactttgcggcacttctggaaagggccgtgacgagggccgacatcacctcctaccttgccgctgccaacgactcgtacgtcagcacccaggacctggtggaacaggtcatctcacggttggaccgcgagctggcggatttcgaggtcgttcagggaatgcaggacgagctgaatgctgcatgcgccgaaataacaaatcgcgcaagcgcggtctgggccacggtcgaagctctgagcgctctgtacaagaagcacgacagctatcgcacccggggcccattgaaggataggtttcccgcgtggcgggaagatttccgcgccggtgcttcggcggctggcgcgccatttaatgacggttttctgtactgtctcatggcaatgattgtcaaaaatgcaagaccaatccagcacctatcaactacttcggctggtacgcaacctaaggctgaagaatga

SEQ ID NO: 93523 - DNA, 1791 bp, Acidovorax sp. Root70
atgagccgaacagtcgtcttcaacgcactctggttgctgtccgaaagagacgcgcgggcccgccatctgaccttcaacgcggagatgaacctcctcgcgggtgacaacgggatggggaagtcacgtgtcatcaagcacctcgtgtgggcgcttggatgcgagccgccgaaaagggcggcgggcgactttgactcgaacaccatcgctgttgtcgcgctgaccatcggaaaaactcagcgtacgttcgtccggcaaaaccgggggagagccgccttcgaccgcgacggcaaactgattcttgccacggcttctgcatcgcagtggaacgagtacttcgctgaagagtttgactttccgctgaagctgcagcgtcatgacgacgaaggcttcggcctcgctggtccgagctatgccatgctgccgttctatatcgatcaggatggcggctggggcgtgaagtggaccaacttcactgacctgacccagttcaccaactggcagacggcggtcttcaactccttctcgggagtcaagccatctgcctatgtgcgcgaccagctcctgcgcgacgaagcgtcgtacaagcttcgtctggcaaaggcgcaggttcgagtacagcagacctcttacgagcgtgtcgtggcaatgctcccacccgagtccaccgtcatcgacgaaagcctctttgccgagcagctcaaggaaatcgcggtgaaggcgcagacgctcaaggaagagcagggcgtcgtccgcgctgagctgatgctgctggcgcaggagcggcaacacagaattgccgagttgcacaccgctcttgaaagcgagaagtccctcgtggaagacctggcctacttggcagactttccggacaaccagcagctcgtgtgtcctacctgctctcacgtgcacacaacgtcgttccacgcgcgacaggcgttggcagtcgatgcgcacgagattcacgaagctgcggtcaagctgcaaggcatccttgagaagctgaagttgaaggagtccgaacttcagcgtaggctttccgccgtagtcgagaagctgcgggacctcaatgcctcaattaaccagaagcaggatggtcacagcgcagcggacgtgattgcggccaagagccgggacacgttggaacgtgcatatcgcgcgacaaatagcgagctgactgcgcaggtcgacaccctcgctgaagagaagaaaacctacgaaaaagcgctggagaagctgaccgataagggacgggagaagcgagtcaaggagttctttggagagaccttcatttccgtcgccgatgcactcgatgtcgacaagaaggaaatcgggaagaagctcaagattggagaacggccaccggcggcgagcggcagctacatgccccgagcggtgttggcgactcatctcgcactcctcgcgacacactccgagtacggcgttggctgcaaattcccattcgtcgtcgatacgccccaacagtccggtcaagacccggccagccttggtcgcatgcttgacgccatcttggtgagctccgggagcggtcagcgcttggtggccacagagtcgattccggaggggtggctgccgccgaaggactgcaaggttatgcggttcacggagaagcgcaacctgttacgcgaagcggagttcaaagaaggcgcggatgcggtgggtgccttcgtgaaggccatgcgggatgcgcttgcgggcagcgaccaggctgcgggggcagacgaaagcgagcccgctggtccggctgacgccgaggacgacgacgaagaatga

SEQ ID NO: 93524 - DNA, 1092 bp, Elizabethkingia genomosp. 3
atgggagaaaaaaaaattgacagtaattcaggtgttcaagcaagcgttggatttgattttcaaagaaacagttgtatttatatatttctagagaagtatagtgctttaaaagaccaaaattatttcattatgctagagcattatgatgatattgttttcggaattttaaatgaaaaatccgagctcgcagagataacaacatatcaggcaaaaaaatcttcaactaactggacaacaaataaattatatgagattattcaaaaaatttgtaattcaggagttgagttgttaaaagatgaattaaagaaatctccctcttattcacagttacatcattttataactaacaatacaatttctctcgactataaatgttctacttcaaaaaaaacagaaagattctatgttaatgaaacaaacgaatctgtaaaatacactgctttacctgtagattgccaaactaatttaaaaaaaggaaataccaatatcacatttgataaagatcagttagatcaattttctaatctaaattttagctttatagatattgggcgtaatacaaaaagtcaattagaattattatcgggaaaatttaaaaccgtatttggaaagcttattcttgatcacgatgcagcgagagatacttttatttttaatctaaaaggaattgaaagcacatataataagggtgatcaacctaaattaaaagatgtatcaaaaagattagaatcttcaaaaataaatgagatcctaaatatattgactacaaagaatcttgctcttgaaatgtgtcgaaaaaaagcagataaaatctatgatgaattgggaataaatgtagttgacgcactaaattttgaacttgattttgaaaatagtttagatcattttaaagacttaaagcaaggagagcatcaaaaaataattaaatacattgaaagtaaaaagccaacatttgcaagctatactaatgatgtgaattgtattaaatatctacatgacgattttttaaaatataatagctctgtattgtctcctactcaactaaaagctgcaatagcggctggttattatcaaatacttttacaaaaatga

SEQ ID NO: 93525 - DNA, 1734 bp, Elizabethkingia genomosp. 3
atgaaaacaaaattaaaactcaataaaatatttatccatagtgaagttaataaaaagagtttttttactgactttggaaacaatcttaatgtaatatacggggcaaatacttcgggtaaaagtaccttaattcaattaatactatatacgtttggaatcaatgataataaaactaaactggtaaaaatattatcagagaatatatttacacgtttagacataacaataataaaagggacacagaataatgattttacttttgtgcgtaatgatgaaaccctattcatcaaaaaccacacagaaaataagataattacatttaatggtatttctggtaatagttctgttgaacatgcaaaattgaaagaatttttcaataatttatttgattttgatttactgttagaatctaaaagcggaatttcaaaagcgccaatagaaacaatctttttaccctactatgtatcacaagatgtgggatgggtatatttaagaaagtcctttagtaatcttgatttttataaaaattttaaagatgactttttagactattatttaggaatctcaaaactagaagataaagaacgaaaaaaagaacttgaaaatgaattgaatgataaaaagttaaaatataacttctatcttaattttgaaaggactgataaaacaattgagacagctaaacttattgatgattcttttaaaggaaaaggacaagaatttatcaacgagatagcacaaagaaaatcagagttattagaactggaaaatgaatatgtaaaaaaatcaaatatattgacctataatactcaaagactttctgttgtatctaaggttagtagaaatcataaacatcagttccctggcaaagataattgtcctatttgtcaacagatattaccaatagatacgaaagaaatatatcagtactatcaggaagaaaatgattcaattaaaataaaagaaaagatatcattagaaaataaaaagatacagtcagacatcaattcattaaataaaaaaattagtggattacgagatatgttagcaaatgattatcataggcatataatttattcgcagaaaaatgttacgcttgatgaatggataaaaacgcaggcaaacataaagcttgaagattcaataaatgcaaacattggaaaattagatttcgaaattaaagctttaaaggaaaaactacaattatttaaaaatgatgaagatttagaaaatgagcgattagctaaaaacagaaaatttaaagactattataactccaataataaaaagcttggcgttcctcagttggacgatagaagattcaattatatatatgaattatcaagttttccttttcaaggtgttgagttacaccttgccgttttgagctaccattttgcttttaacaagatcattaatgaaacaaataatattcaaagacttcctttaatgcttgatagcatctttaaagaggacttagatggaaagagtaaggataaaattttggattttatttgtactaacacaccaaaagatactcaaacaattatttcgttagctgataataaactaaaagactctaaaatagaatactataaaaagacatttttcaataataatacaaagctaatttgcattggtgactcaactgaaaagcaatcaatcttaaaagatcatcatagcaatttagataatttgcttaatagcacttatgaaattatggagcatgtttaa

SEQ ID NO: 93526 - DNA, 1065 bp, Sporosarcina sp. HYO08
ttggataactttaaaccaagagagaacagtggttcaagatctacaaatcgtttaaatctgcaggcatcatatgcaataatcaaaattcttgagtctcatgaatctgattttactgtagtaatggatttagtcgatgatttggcaatattttttaatgaaggaaaaaataatattaatacatatcaaattaaaacagtcggatcaaaaagctctaattacaagttaaattcactgatatcggatgatgtctttttaaaattatatgatcatgtagaacagttcgaaaaaagcatcaattcgattaacctcattacgaatatgccaatttctcatacttataaagatcctattgagaataaaaacaaaacagttatcgtttctaacacgaaaatccggctaaatcaattacaaccagaagttcgaatgaaaattgaaggaaatatgaaaaagagttcgcatttcataaaacatgggctttctgataaattcacattttctctctgggatatatcagtcacatctcattatcaaattacccaagcagccctattagaattttgttcaaatgaatacccttatatggatagtaaaacaataactgcattgcataagactttatacgaacatttattaaacaaacaatcctatgaatttgaattaactgatgatatggaggaagtttttaaacataagagttattctagtaactcatttaaagcgttgttatatcaagcaacgtctgtaggaacgttaacaatggagaaaattaattctgattatatacattttgataatttgttacatgaaactaagtacaatcaagctttagtaagattgaaaactaaaatatttcaacatacaaacttgtttgaacgtaattttgaaataatagcgcctgaaatccaaaaaacactatctaaagtaaaaacaaaaaaagaattattcgaagtattaattcttcaactcaatacagaactggtatatgagttaagtcaaatagaaaaagaattattgctaataaatgggatcgaagaagttttgaaaaggggattagaggatgaataa

SEQ ID NO: 93527 - DNA, 1755 bp, Sporosarcina sp. HYO08
atgaataatttaatgtttaaacaattagaaattatagacatagtcacatacgaagcattttcgattgagtttgttaaaggggtcaatattattacaagcactgataatagtgtaggtaaatctactattttaaaatctttatattacgtccttggtgctgaagttaaatttggtcatagaatcaatccgaaaaatttactgatcatattgaaatttactttcaataacgacgagtacacaattatgagaaatcaaaatgcatataaggtgatcgagcctaataatattataaattcatttcataacaataaagcaatttctaagtttttgtcagaactttatggtttcaaaattgaaattgaagggacaaaaaagagaattgaaagtgcacctccagtcttttattatttgccttattatattgaccagatgaaagggtggcaaccagatcctgaaaattttgagaggttaggacaattcaataaacctaaaagagatgcttcgttgtattttcatttagggatattaggggacgactaccttagtttaataaatagaaaggaagaacttagtaacgaaaaaaaagatttaaatataaagcatgaacatacacataacttgttaaaaattattgaagaagaagttacctcatttgatatttcattaaataactctgatgaattacttttacaaaaaagaactcacttgaaaaaatatcaaaaatacaattttgatgcaaataatattaaacaaaaattattggagtataaagaaactctttatcaattgaattttactataaaaaatatagataaatcagtaagaaatgaagagtctaagaaaaaattaatcaatgaaacagacttatatattgattgcccaaactgcgagtttgaatttaatattccacaaaacaaacttttcaaagtcaattataacgtcgaggaattgcaatctcataaggttgaattattggataaaaaatcaaaattgattaatgaaattacaaaaattgaaaaagaactttatatattttccctccaattaaatgagatcgagcagattcagagtggaaattctaattcacttgaaagtattatgaaattcaagggattagaatccactaagaataagttgttaactaagctaaaagaatatacggtctcaattgctgaaattgaaattgacattaaaaaaatcacagcaaaaatcactaaaataaataaacaaaaatcacaaattgactataaatatagtgagtttttagaagaatactttagcctatttgaaataacagaaattgtaattgaggataataatcggaaacaatttgttccgagtaaaactttttcaagtgatggagcgaatcaaataaaattaaatttagctcgactctattcgctggtaagtttaataaaccattacaaaaatggagttttattccccatagttattgactcacctaaaaccggagaacagagctttaaaaacaataaaaatacattagataatctagtacataaaatcaaattagacaatcaaactataatagcaactattgatttcgaattaagtagtaataaaaggaaatttaaattaataaagcgtagccgcagagctaagttaattcaaaacaaaaaactgaaagtaattaaactggctgatagagaagcgagtctattaaactctagcatttttaatgaaagcctacaaaaatatgaggaatatataagaatatttacaactgatcaatga

SEQ ID NO: 93528 - DNA, 636 bp, Xanthomonas sp. NCPPB1128
atggcaggcagcgacaacaataaggacctgcaactccatcaggtagcacctacggagcaagttggtcgcgacaccatcgcccgctatcaggcccagtaccgcgctgcggccatggagtgcctcaaactgctagatcgccagtcgattgaccgcgtttactgcgaatttcacgatgacttcgtgagcagacgaagcgttggcggggctcacttctaccgcttcttccaagttaaaaccgttggtaaacgaaaccatctgtggtcgatcgctgacctctttggcatccctaggtcaaagaagaaaaaagcatccaagaagaaggcatgcccgacgcctgcggttgccacaaacgactcggccggtaacgtggacgacagcaataacctgtcatcgcgaatagctgacagcttcttgggcaagcttctccttcataccgtcagatttggcgaatcctgcgagcaagttagctttctcaccaacgcgaacctgaatgacgaggtcgagttggtgtctgcggcgctggaaggtggcatcagtgagccgaatgacgttctgagcatgctctccgagcacttcaattccgcgtgcaagatcgctgacccgctctgcctggggagatcaagcagcgtctcttga

SEQ ID NO: 93529 - DNA, 1548 bp, Xanthomonas sp. NCPPB1128
atgggtcgatactacgctttccgtagatcctttaagggggctttcttcattgaggttagcgacccgttggcaggtgacgctgaaacgctcgccttccacagtgaggccgatttcagtcgttacatttttcagctgtgggggtgggccgaccctgttctcgtgagcgtttccggtgctgcgaccaggctttatgtttcccaggttttgccgttgatttacttggatcaggatgagggttattcgagtttttactttacccccagcaggttcatcaaggatcagtacaccgaggtcatgcgttctgtatttaggcttccggccaaaaacgccttcgaacagcgtaagctcaggcgcgagctccaagagcggctggagcgcctcgatctctcaattgttcgacgtcaacgcactatcgggcagcttgagtctgatgtgactcatccccgccgtagtgaggcagagctttcggacgagctagctcaggtgcagtgctcattcgaatcactgcggcaggggggagacgctcggtccgagagcgaagtaaccctcgatggagagatcgctctcttgaggcgtcgagtatccgctctgactgcggacaaggctgagcacagagcgaggctaagtagcttccttgcgattagcaatgagatcgaaatagaagccaacacgctatctctgaacgaagaggctcgagcgatctttgcgtcttttgattccgtttgcgcaaatcaggcgtgtgggctctttgtcaatagctctgaatcgtatggaaagagcctgctttacctaaaagatcagttgaaggatctggagcgcagtcgcaaattccacgaggacgcggtcgcgcgattggacggaagcttagtggatgctgagcaggagctgagaaagaaggttcacgagaaggaagcgcttcaaactgacgttcatgccgcgagcttggtcgacgctaccgcattagtcatggagaggctcatagcgttgaagaaggatctgctcttggaggctcaacttcatgaggaggagcagtcttatgtggcagagttggatgcaagaagtcgtacccatgatgaactctcgaatgttatgcgaggtcctggtaatgtcgatctcgttctactcaaggtcaagtcagccctagaggagagaattcggcattggctcggcgtgttgcacgcagttaatttgccgaagcaaattgcaatcgactatgactttggggtcgatctcgtgggtgacaattttaaggcaattaaggggagcacaaagacgaggcttgttctggctgttaggacggctgcgttggaggttcttttaatgaacgaccggttttcgccacggttcttcttgctcgatacgccgcgccagcaagacattaagaagggagattttgcaaattacgtagatgcgcttaagcagctttcagtggcttatggagtccaaattgtcttctcgagttcgaactaccgctatgatccggatgagcgagatcgagagtggcctcctaggttcgagggagtggagcaagcaatgtacttggggtaa

SEQ ID NO: 93530 - DNA, 1170 bp, Pseudomonas sp. L10.10
atgcttgatacaaaaaaagccagggagcaaaacggtagagattcattcagcagatatcgcgctcaggtcagatctgcagcggtagcctcgctctcaatactggagggagcgaatgtagatagggtttactgcgatcttcatgatgatttcgttattagaaaaaaagataaagatggattttcttatatcttctatcaggttaaaacaaaaggtaagcaaaaccacaactggactatcaatgaagtttttggtcttaataccaggctaaaagatcaaaccaaacaaagctccgactccatcaaggacagcttcataggaaaactattacttcacaccgttatctttgacgaacattgcaactccgtcattttccagaccaatgtaaataatagcgatgaagttgacgaactattgactgacattgagtctggagcttttgctagtaaattctcaaaggttattcttgaacgctttacagagtgttttggggatgactgcataacgtatagcccagaggaagcaaaatcaaaactatcaaagctttcatttgagtcagacgtgtctttcttgaaagatggagataattactttgagttaatagtaaaggaaaaaatatatcaattcagcgagatagatctagaacgcgctgagttcagggaaattctactacgacttcttgacttggtagaaagaaagtcaagtggagtaattaagacctgggatgctgaatctattgaaagctgcgcgggcatatcaatcgatgatcttctcaccatattaagcatttcaaaagacgcatatcatagtcttttgaaaggtggtgatagtagcgccataaagtcagcatcaatgattcagagagcattgaaggccggcggggcagacacgtcaatggtcatgtattgctccaaatgtaaaacagattgggacctttggtttagaaatgctaggcatgtcatacaggaactcgacctgctatctatctctgaacgtgtaggcaccactcttaagaacacggtagacctacaaggttttttagccttaaacagcctgcgcatgccaattaaaaacctgctcgcggaactcgaagcacaaggcctacgattcgacctcaccgaggatctcctgttaggtggaattttctctgcgtttgtgagaggtaaatcatga

SEQ ID NO: 93531 - DNA, 1770 bp, Pseudomonas sp. L10.10
atgaaacttataagtttaaaaatattcccaaatggccagctgggttggggatctggactcttaactttcgggaaggatataactcaactacttgggcctaatggatgtgggaaaaccccggtagttcagtccattcctttctgtttaggttttccaagtattttccgaaatgatatatatgaccggtgcaagcatgcagagcttacggtcgcatctgacaaaggcaatttgcttttacgccgaatatacagcagagagttagacgtcgaagtagtagaacctacaggtgtagttcaaagattctataacgaaaaggattattctcgctatatatttgaatggcttggcttgacagttcataacttagttactgtgggcaatcagcctggcgcagcttaccttgctacgctgctgcccatgtactacttagatcaagatggcggctatagtgaaatttattgccctccaagtaaattcattaaagatcaattctcagaaatgatgagaatggtttttgatttacctgttaaaaattcgtttgatgtaaagaaagatcgcttcagggcaaaagagcgtttagattttctagacaaagacactcagactctttccagaatggtagagactgctaaaagtaatattttagaaatcaaaaaatccagacctgaactgacattggaaatatcgcagttagagtttgaagtggaaaatctccaaggtgccggagccagcagggatgactccattggtgcgttggatcgcttgatatccaatcatcgaaacaccattagagaagtatcatcagaaatcaatcagttacaaaggcgcaatctcggaataggtaagatcgttcacgaaatcaatacagaaatagaaactcttaacctcaatgaagaagcgcgaagagtgtttctatcattcagagaaatttgtggcgcggacttatgccagctattctcttcaagctccgaatcttacagtaaaaacctactataccttcgcgatcaaattaaagacttagaacgaaatgcaggtcttgacgaagtcagaattgaagaactgaatcgtcaacgcacagctcaagaggtagccattcaagctttagttgatgagcgtaacttatcaagcaccaagagtgaaatatcaacactagtagaggctattacaagactaaaaagtcagatcttcacacttcaaattcagttgagcgagcttgacaaagtagccgtgctggaagagaagcagttcaaggcgctagtagagcgtgataaggcgctgactctttatgaatcatttacggcagaccggtcacactctccagatctgattaaagtacggtcggatattcggcgctactttatagactggctcgacttactacacacatacaacgtcagtaaagatatcacgtttaaagatgattttacgccactattaggcgtcgagaccatatctcaactgaaaggtagtacgaagattcgagctgtactggcgtaccacgcggcagttttccaagtttttgctgaaaagggagtaatgggtttcaggtttatgattttggatacacctaagcaacatgaaataaataatgacgatttaggtcgatatttaagcgctttgaaagcattgtgtgtcacgcatggtgcgcagatagttttctcaactaccgaataccattacgacggggatgacaacgacgtcgagtggctgcctccttacgaaggacaagagcaaaaaatgttcttgagccttggcggcataaacgattag

SEQ ID NO: 93532 - DNA, 1053 bp, Stenotrophomonas sp. KCTC 12332
atgctggaactggagcagtccaatgctccagacttcctgcttcttttcgaggcagttcaggacgtcaccgaactcgattcagtcagcgttccaacaaaggctgccatctaccaagtaaagaagaaggacaatggaacttggtcctggtcgatgctaaccggcatctcagcaccgaagcgaccgaaggctgccaaaaaggttaagagcgctgccagcactcccgccgcaccgaaacctactgccgccccaagcttcgacaaggtcggcgacagcatcctaggtaagctccatctaagcttgacggcgttcgagaagttgccggctgagggtatcttcatctcaaacgctggctgcgacgttccactcgcctccggggcgaatgcagcgacatcgctgccgtgcgctctatcagacttggcgactgaccatgcgcagatcctgaccgacgcgctccacactctgggggctgcgggagctccgattccagacctcaagagggtgcgactagcccgtgtggctattcatcctgacgatccgtcggcgccgacagtgacgaaagcgttggaactgcttacgcaacgcagtcccggacatgctgcacaggctcaagcattcgtagagtcgctcgtcatgaaggtatctgcgttaggtcgccgcacggcgacgtgtgcgacgttcgctgatctggttaaagaacgtggattttcgagggccgagttccactcggcactcagctcacttgcaaccatccctgaccgaaacgcgctctttgagagctggctcacgaagcttcaacaggagggttttgactttagggtgcttacgacgatgcgaatggctgcggctagaactgcggcggaacgactcaccggagcatcgcctgaagccttcgagattgacgcgttctgtgactcctgggcgcaggcaaacgcatgtggaccagatctaaagccctacgtcgatgctgcgctggtcgcgatgaaggctcgtttcggccagtttagggacgaagagcttttggcgcgctttgtcatgagggcagtgacgatatga

SEQ ID NO: 93533 - DNA, 1737 bp, Stenotrophomonas sp. KCTC 12332
atgcatcgctttcgatttcaaaacatctggctgctctcactgcgggacaagaaagctcgccacgtgaagttccacccgaggaagaacctcatcaggggccggaaccacatgggcaagacgacactgattcggagtctgtttgagaccctaggtgccactccccagggaactctcgagtcatgggataaagatgccgtttcgctcttggaattctcgttcgacgggaagcacttctttgttcttcatcagaacggtcgtcgagcgctgttcagtgcagaccgtcagctggttgccacaactagcaagttcgccgaatggacgagagttttctgtgaagttacaaatttcaatttagtattctctggtaagagcgagtcggacgttgttccggcagacgctgcctgtttcttcttgcccttttatgtaaatcaagacggaagctggcagtccgagtggaacactttcactggcctcaagcgcttcgcagcgccatggactgccatcctcgagtacttcaccggcgtttgcccgccggcgtactacgaagcgcgcgcaaagaaagggcagcagtcgcgcgtactcgatgagtaccgtcgagagctaaggttgcttgagcgaacattggaccgtttcagtcgcactgtgccggtgcacgggccgaagctgaacgctgcaaacttcgaggctgaaatcgatcagttgacccgtgagatcaccgacctcaacgctcgccaagagaagctccggagtgatgccgttcgcgagcaggagttgctgaccagcttggaccatcagactcgcttggccgatgaggcgctaaaggcttacaacagtgacgcggcatggattcgaacggcaggaagtgagccgctcatttgccccacttgtcacgcagagcacaaaaagccattcctagatctgttgcagtttgcagaggatgctcgtgtcctacgcgaactagctgcgcgccttcgcgatgacgcggccgttgttcgcgctcggtgccaaaaggcgtttcgcgaactcgctacgctcaacgagagctaccttcggatatctcggctgctggacactagaaagggcgaactcaagttccaagatgtggtcggaggtatcggtgccgagggtgccttcgctgcctttgaagccgaacgaaagcagctccagggtgccattgatgaagctgtcttggccgtcgacaagctggatgagacgatgaaggatctgcgggccatcaagcgtacgaaagcaatccttgccgacttcagagacttttacgccgcaggccggattgcactcaagcttccctccattgacgtatccaagatgaagctcgcggggcggcccgacctttcgggaagcggaggtccacgctccatattggcctactacgcggcgatttggcgcacggcgcacggctctaatgccacatacgatattccagtggtcatcgattcgcccaaccagcaggcgcaagatgacatcaatcttcccgcagtactcgagttcatcgctagggacttgccggacgatatccaacttatcgtaggtcttgagacgacatcagagtttccattcgattatgaactgcacctcgagcggaagtactcggtcctcatcgaggaagaatgggatattacctacggcacggttgagcccttgctacaagcgatgtacgccaacttgctggcccactcggataaatctacgcctgaaccgcgttcaaccgatgtctga

SEQ ID NO: 93534 - DNA, 1179 bp, Alcanivorax sp. Nap_24
gtggctggggaaaataacggtagtccaaagcttcatgaagttaagccacgggagaacgttggaagggaaaccatagcccgctatcaggctcagtttcgcggagcggctttcgagtgcctgtctttgttggaggatgagacgctagaccgggtctattgtgactaccaggacgatttcgtgtctcgcctcaatgttgacggaaactatatttataatttctttcaggtcaaaactaaaggtaagttgaattatcaatggtccgtaaatgatgtcttagggataagaaaaggcgctaagacatgcgaaccagccaagattactgatagctacgttggaaagctccttatccacaccatcagatttgagaactcctgtgggagcgtaatttttctcactaatgtccatctgaacgacgatttagagggcttgcgtgatgcgatagagggtgatagcgataacaattattacaaattattgctccaaaattttaatgacgccttaaccccggaatcgccaatagaagataagaatattatagagcgcattaagaagcttcagcttaagtccaatatttcctatttgaatccatatgacgataaattcttcactgaggcaagagagaccatttatcagtatagtgaaatagatttgcagcgttcagagtgtgaggaaatacttaacagtcttatatttcttgttgagcgaaagtcatttgcgaaactgctagaggaaatcgcagaagaggacctagatgatatagcaggtgttagtcttgccgaaatgctcgatattttgagtatctccaaggcggcatatcaaagcttaagagatggcggcgactcgcaagccattaagagtgcttcaattattcataggttgatgagtaaggcgggcgcgtcagaaagaatgatagagttcgtatctgactgtaaggttcgatgggatatatggtttagggataaacgtcatactattccagagttcgatctgaattttattcttgaagaaatagagaacaatgctgctgaatgggctaaatttggagaaaacctgacggttcttcgaggtcgaattgataaagtattgtcagacttggatgacgaggacctgtctgccaatcttgatcgtgagctgcttctcggcgctgttttctcctttttagttagaggaaacgcgtga

SEQ ID NO: 93535 - DNA, 1314 bp, Alcanivorax sp. Nap_24
atggcgaaatgctcgtcagtcagcctcactgtagagcatgaagaggactttctcactttcgaaaggtttttttccgataagtttcacatagaagtctcggagcgaggctccaacgaaacgagtatattctacaacgaaaaagagatttctgagtactttttttcgagacttggactctcgccgctcgcgctgacaaccaataagaacgagcccacttatccttatatatcgacatttttgcctctcttttatatagaccaagacgccggttatacgagtgcttacaagcccccaggtagtttcataaaagaccagtatgccgagatgatcagattggcgattggcatagcaccaaaacattcgttcgaggcaaagcgctttctcatagaaaagaaaagagaacttgatttaataaatattcaaatcgtcaactctgaagagtttatccgaaagctcgaagaacaatctgatgatgagacttccgtttcagagcttgaagatgagttgagacaattgagagatgaattggaagagctccgcaatagttttgatgcgacgaacgatgccgattttgttctgcaaagattaattcgcgagaagaagaatgagcggtttaatctctctgcttcaataaaggaactagaaagccgcatatcaggtttcaataagataaaaggcgaaattgagatcgaaatcaacacgttatctcttaacgaggagtctcgtcgactttttagttcttttgaggatatttgcgccacaccagggtgcggtcttttcacctctagctcagattcctacgggaaaaatttactttatcttcgtgatcaaatcaaagacttagataggaacaccaagtttcaagaaataagggtggatgactattcatctagcttaagaaagcttgatgaggaaattgcctcgctcgaatcgaatttgaggaaggaagagaacggctcccaaacagctccattgatatcggcaatcagtggcttgacgcgatcgattattgatcggcaaggcaaaaaggaagtaatggaaaggatcgagtccgagaaaaggggttacgttcagctattgaataggcgcaggggccttcaaggagatatttcgtcttttgaaggtgccgcgggttcgaatgatatcagaattctcgaattcagaaattcctatcgtaagaagattattgaatggcttgatgtactcagtacgaagaacgtttcgagagatattactgtcgacgctgatttcaatgttctatttggaagggaaaaattatggttcatcgcggattaccgggaaaagcggctttga

SEQ ID NO: 93536 - DNA, 1036 bp, Paraglaciecola sp. S66
ttggttaaactccacgaaatttctccaagagaacaagacggaagagataccctgtcaaggtataaggctcaaacaagagctgcgggcttggctagcttggaaatactagaaaataaatccgtagatcgagtttattgtgattggcatgatgattatgttgtcagaaagagcattaacggaaaaattgtttatcacttttttcaagttaaaaccaaggaaaaaagaaatgctcaatggtctctgaacgatatttttggtgtacacaatcgaaccaaaacagaaaatatagcagagagaatcacagaaagctttgctggaaaactgttaattcatactgttaattttattgatacttgtgaagcagtggtatttcttacaaatattcatttgaaagatgaagttgaagaccttttgacttcattagatcaagatgattattcgcataagaccttacaacatttaacaaaccattttttagagtgcttttgcggaggaaaaccactttatacggatgaggaaatcaaggtatttatcagaaagtttagaatcattcctggtctagaacatttaaaggtagatggtactcagttcgaagcgttagctagagagaaaatattcgagtttagtgaaatagatcttgaatacatggaagcaagggagattttagatagcctattaaatttaattgagaaaaagtctatcggagttgtgcgtactgctctgaatgaaaaacagttagatgaattagctggagtgggaatagaagatttacttgagattttgagtatatcaaaaattgcatttcagagccttagagaggggggggataagaaagcactcaaaaatgtttctatattacaacgtattttaggaaaatctggcaccccaaaaaacctcatcgattacgctgcaaaatgcaaaacagactgggatgtatggtatcgaaaaaatagacattatattccagattatgatctagcaatgttggaatcaaagttgtcggacgtaattaaaaaacattctcctagtggcgtta

SEQ ID NO: 93537 - DNA, 1773 bp, Paraglaciecola sp. S66
atgaaacttgtcagtttaacagtaattggcagaggcgttacgggatggggtactgaagaacttttttttgctaaatctataacccaattatatggtgcaaatggatcaggtaaaacacctcttgttcaaacaatcgcattttgtttagggtattcatgtattttcagggatgatatttactcacattgccaatgtgcaaaactaaaagttttcatcaaatctaaaccgtatgaattagagagaaaatactctagtgattttgaagtattagtaaaagaacctactgggacaaaacagacttttttcaaagaaggcgactatagtagatttttatttgaactgttaggatatgaatttccacagttggttacgaactctaactcatttacacatccatatttgtccacgatattacccctattttacctcgaccaagatattggttatggtgatttttataattcacctggtagcaattttattaaagaccaattcattgaatctgtaaggttgagtattaacatgccagccaagaattcttttgatcagagaaaaagtgctattgatgcgaaaaagttagtggaaaaagcggatcaaaaagtccacagatttaaagctatatatgaggacacactcaaaggcacagatattggctccgtttccgttcaagaaattgataatcaaattgaaagccttaaatccaaaataaataagattaaatcaagtcaaaatttaaagttagatgctactgatagcattgataagttaatttcatcaaaaatgtcacaaataagagagcttcaacaggaaatttcttttttggaaagtaaatgttcaagtatttcttctattcgctcagaaatagaagttgaaataaatactctctcattgaacgaggaagcgaaaagaatctttatgtctttttctgaaatttgttcagttgatggatgcggattatttcttggtagttcagagagttatggtaaaaatctactttatttaaaagatcaaataaaggacttagtgttcaatgcagaaagctcagagcttaaaattaagatattaaaaaacgaactacaagctcattttgacgatatagatagattaaatttggctagagagaacactgagaaagacgaaggtttatctgctttggtcgaagccattcatatgactcttgctgaaataatctcacttgaaatcaaaaagagagaaatcgaaaacctctcggaaattgaagaaaaatatttagcagcagaaagagaaagagatatagctcttaacagacaagattcattatcatcatcaccaaacaaatcttctttgggcttaataagattcaagtctaatctcacacagtccatttctacttggattaaaacgattaatactaaaaatgttccagatgatgtcaatttattagacgaatttaaagccacttttggtggtgaaaaattgtctgcatttaaagggagtacaaaattaagagttgttctttcataccacgctgccttgtttgaagaaattatcaaatgtaataaacgaggtatacgttttttgattttagatacaccgagacaacatgacattagtgctgaagatttgaatcaattcatcaaagctcttaagattcttgctgataaagaggatattcaaatagtcttctcgactacagaatacaaatacaaaaaaggtgcaaatgacattgattgggtgcctaaatacgatgatccaagctttgatcagacaatgtatttgggtaaaactaattag

SEQ ID NO: 93538 - DNA, 1101 bp, Achromobacter sp. 2789STDY5608612
atgcagtaccaggcggccgcttatgctgcactggaaatccttgaaggcaatggcgttgactgcgtgtattgcgattatcatgacgatttcgtcgtgcgtcgcatcgttgacggaaagaccacgtaccacttcttccaggtcaagaccaagaacaaaatgaacgcgcaatgggatctcaaagagatctttgcgctcaagaagcggggccagaagaacgataacgacagcttgaaggcggtacaaagcagcttcgcggggaaattactgatgcacggcatcattttcaacgccgaatgcagcgaagtgaccttgctgtccaacatctatttccacgatgacgttgtgaccgtcgtagacgagctgcgcgggaaaacgccaaaatccaagcacgccaagttcttggcggacaatttctcagccatattctcccttgagcccgccgcgaacgatacccacgtcgcggacaccctcggcaagctatccctacgtccctcggtaggctatatcagcaaggaaagggatgtgttcgctagcgccacgcgcactgccatcttcaactacagcgaaatcgacctcactttccacgaaacggccgagctttccaatggtttggtcgacctggtctatcgaaaatccagaaccccgttgaaaggcatcgcgccccatgaactgcctgcccgaatcggtgttgggcttgatgatttgctggaagtgctcagcatttcgcggtcagcctacgatgcacttctgaaaggctctgaccccaaggcgctaaagaccgcatcggtgcttcaacgatggttgaagggcgcgggcgcgaacgacgacatgatcgaatatgcctcgcagcaaaaagtcaattgggacatatggttgcgcagcgcacgacacatctacagcccgcttgacctgcacgcgctgcttggcctaatcgacagtctttacgatcgctgggcccaaagtggtcaggggttcacgtttctcaacgacttattgcagggacttgacggggacacgacggtcggcaaggttgaagggctggaccgagaaatcctgttcggcgcggtttgcgccgtagtcgtaaggcgacattcaaagtga

SEQ ID NO: 93539 - DNA, 1758 bp, Achromobacter sp. 2789STDY5608612
atgaagttcttgtcactcaagctggttgcccgcggcattcacggctgggaaagtccggacctcgtcttcggcgcgcgaaccacttccctgcacgcgcccaatggaagtggcaaaacacctctgctacaggcggtggcctactgcctcggctttgccagccaattccgggaagacatccgagaaaagtgtcaggctgcagtcttgactttcgaacacgatcagagcacctatacgcttcgtcgagacctgggaaacgatttccatatcaccatccaaactgacgaaagcgaacgggagtttttcagcgagggggatttttccaaagcgcttttccaagagttcgggatgtcggttcccattttggtggcaaacaatcgacagtccgccacgccgtatttctccacgctactgccgattttctatgtgcgccaggacggtggctataacgacccctatcggcctccggccaccttcatctttggccagtttgtcgaaatggtccgattcgcgttcggccttggcccaaggcggtcatacaacgcgcagcgggatcttattgcggcgagagaacagcttgacggtgcccaacgccggctcgtttcccaacagaagatcgtcgccgacatgtccgcaacgattgatgattctcccttgtcgctcgaccgcttaaaccagaaatcctcgatgctgaccgagcaaatccaagacattaaaaactctgttgatgccgcgggcgccgcgaatgatgccgtcttggacctgctgcaagccaaagaggagcagattcgattaacgcgacgccagcacgctgatctccaggcgcgccttgccggcatcgactccatccgtggtgagattgaaggcgaaattcaaaccttatccttgaacgaagaatccaagcgggcgttggagtctttctttgacatctgtggccgggcggattgcggtctgttcatgacgagtaccgagtcctatgccaagaacctcatgtatcttaaagatcagatcaaggatttggaggcgaatgctggtcgcgcggaaacgcaattggagatcttgaaggccaggctcgccgatcaagagcaggagcgtgctttgattgcctctaaggtttcccagccagaacggcagaacgcgacccagcagcttatctcgtctattcaggccctgacgaaagagcttttggaaaccgagcaaaacctaaccgcgattgaacagctaacgggcgagaagagcaaatacatcgaacttgataatgagcgctctcgcattcaagatcgcattgcgctgttctcgaacaatacacgctcggatttggagttcagtaagctcaggcttcgagtgcgtgagttgatcgtcaagtggatggacatcctcaatacgccgaatgcttcacgcgaaatcgacattgatctggatttcaagattaaattcggcaccgagtcgatcgacgtgtttaccggcagcacgcgcagccgtttgatcctggccattcacgcagcgcttttcgagcactacctgcaagacctcaagcgtccatttcgatttcttattttggacacccctaagcagcaggaactggacagcaaggacctaggcgccttccttcacgccctgcaggaggtgtgcgacaaattccatgcgcagatcctgctctccgcgacggagtatcaccatcccataggacagcgcgatgttgaatggcttccccagttccagggcgcaaagcaattgatgtatctcgggccaatcaactag

SEQ ID NO: 93540 - DNA, 1176 bp, Achromobacter sp. 2789STDY5608612
ttgagcggaatcagaggtgcgacggagcttttgtccgtcgcaaacaatccgaagtactcagagaccggtggtgggcacggtgccaagggcgtagatttcgcgcgctggtgggctgtcgtccggatggtggagttggagaaggccaatgaaccggatttcctcctcctctttgaatccgttcaggacgttgcagaactagattctgcgaccgagccaacacgggctagggtttaccaagtcaagaagaaggacgccgggacttggagctggtctgtgctcacaggtacggtcgctcccaagggcgcatcgaccgctccaaagaaacccactaaagcccctgccgcaactcgaaaggcgctggacttcaagaaggtccaaggctccgcactcggcaagctacaactcagcctgaacgcattcacggcgctgtctgtcgaaggcgtattcctttcaaacgcgggctgcgacttcccacttgccggaggcggatccgcagctacaactctgccctgcacactcgcagacttggctgccgaccatgttcagttgttgaccgacgcttttgcctcgttgtcgacagacggttcaccacctgatttgactcggatgaagctgcagaaggtcgctatacatcccgacaatctgaatgcaccggcgattgccgcagcgcttgaattgctaatcgagcgtagcccatcacatgccggccaggcgagggccttcgtagagtctttggtgatgaagatttcgccgctgacgcgtggaacagactgctgccaatcattcgacgagcttgtcaaagaacgcggattttcgcgaagcgcattcatgggtgctctagcagccctcgaggccgtgcccgaccgcagcgccttgtttaacgactttttgaaccaacttcaagctgagggcgtggacttcatgaccatctcgtcgatccgcgtcgcagccacgcgagcccagcaagatcgactcgtcggggggactgacctatcccgcgaaatagaccacttcagcgatgcatggctcgcgtcaaatccgcctacatccaaacttcggccctacattgaggccgccctaaccgcgcttaaggcccaattcggcgcacagcgcgataacgacctaactgcccggtttgtcatgagagccataacgaaatgcgtggaccagaactaa

SEQ ID NO: 93541 - DNA, 1608 bp, Achromobacter sp. 2789STDY5608612
gtggggaggaaccacacaggcaagacgacgctgattcgcagcttgtttgagacgctaggcgcgacgccacagggaaagctcgaacaatgggacgaaaacgctgcgtcgctactcgagttctcagtagacggccggagctacttcgccctccaccagggcgggcggcgcgcgctctttgatgcaacgttcaatctgctcatctccacatccaagttcggcgactggtccagacgcttttgtgagataaccgacttcaatttagttttctctgacaagaagcaggcggaggtggtccctgcagatccagcgtgtttcttcgcaccgttctacgtgaaccaggacggaagctggcaggctgaatggaacacgttcagcggaatgaagcgcttcaacgcaccttttaagccgattcttgagtactttaccggcgtatgcccaccggagtactactcggcaagtgccgaaaagtcccaacattccaaggttctagatgaacaccgacaagagtaccgactactcgaacgtgcgatcgatcgcttcagcagatctgtcccgctgtctggaccaaaagtcgacgctgataattttgctgccgagattgaactactgaccaaagaggtcaatgaactcaacgttcgacaagaagtgctacgaagtagcgcagtccgcgagcaagagcttctcaacagcttggaccatcaaatccatcttgcggacagcgctctcgctgcacacgacagcgatgccaaatacctgctcaaggaaggtgcggcgccactcatctgcccgacgtgccacgcggagcacgaaaagccgttcctcgacttgctggagttcgcagaggatgcgcgcgtccttcgcgagctcgccgcacgcctgagagaagatgccgcagaggttcgaaagcgtactcagagggtcttcgccgagctaagctcacttaacgaaaactaccagcgcatctctcgtttgcttgactcacgcaagggcgagctgaaattcaaggacgtcgtgggaagtctcggcgctgagtccgcattcgcaacgttcgaggacgagcgcaagcagattcaggcggctatcgacgccgtggttcttaacgtcgacgcacttgaaacaaggatgaaggaactgcgttctcccaagcgcacgaagaaaatcttggccgagttccgagaacattacgcggccggccgcgtcgctctgcaactgcactcggtaacgaccaaaacgatgcaactggcgtcccgcccctctctttcgggcagtggcggacctcgctcgatcctcgcctattacgccgccatctggcgcaccgtgcaaagcaaggaaggctcgtacgacgtcccggtagtcatcgattcgccaaaccagcaagcgcaagacgactttaaccttcctgccgtcctgagtttcatcgcgaaggacttgcccgccggcatgcaactcatcgttggcttggaaacacctattgacctcaagttcgaccacgagatgacgctaacagagagatacaacatgcttaccgaagatgagtgggagctaacggacaagttgatggagccgttgctgaagaagatgtacgacgcgcctctttctcagagctag

SEQ ID NO: 93542 - DNA, 1026 bp, Sebaldella termitidis ATCC 33386
atgttgagtgaaactaaagttgattttggtggagtggaagcaataagaggatttacttatcaaaaagctgtcacagctcttattttattattgaattataataatgaaaccctttgggtagtgccagaaggatatgaagatatagatgttcatttagaagaaaatctttattatattcaagtaaaatcaaaatcattaacaacttctaaactaatcgtaccagataagaatcaagaatactcaataattgaaaaattgcataataataaaataaatagtgaaaatttaaattttaaaatagtttgtattgattgtgattgtattaaagaagatagtgcagaagcaacagtattatttactcgaacagatacccatattaataaatataagtatggaattgatataggaaaaatagaaaaatctagagcatacaaaaagtttaatgatagtaaaaaagaaaatttgaaagaaattgctaaaaagatatatgtatataaaactccctttacaaaagaattagatagttattggacatatttattaggggttttgacgggaaaaaatattgttacaaatgatcataaggggaaaaatacattaattttaattgatagtattataaaggctaagacgcagatcaagtttttaaatgatcaagtttatgaagataaaaaaatacatacaagtatgataaaaccacttattgagacaaataaaatgtcagcattatttaatgagtgtttggaagagataggatatggaattttacaaaaagatgaaataaatcaagctaaagcaatgattgctattcctttaatttctgatagacattattcttatatagagtcttgtttaaatgatttgagctatttaaaatcattaagatataaaataaaagattacattgatttttctttaggagaaataaagaaaaatgaacaaattatgaatgaattatcagagaatgatataatagcaagaattgttttatactatgtcagaaaggagtttcagcatgacatttga

SEQ ID NO: 93543 - DNA, 1674 bp, Sebaldella termitidis ATCC 33386
atgacatttgataaatttattattttagattatgttaataaaaaatcattgaagctagaattttctaacacacaaaacttaatagttggaaaaagaaataaaataggaaaatcaagtattgtaaaatcattattttatacattaggttataataatggaagttctatgcctgatggttggatatataataatatgaaatttaaattattttttactaataatggcgaaagtagttacataattagacatcaagatttattctatgtggaaggcagtgaaaaaccattagatgaaaaggagtatagatattggtttcaaaatttacttggtatagattatagattaaaattaagtagagaaaaagaaatacaaaatgcgaatgaatataaaatatatgcttcagcagtaattatgccattttatattgatcaagatatttcatggcgtggaactccttataaatcagaagtcatgggaatgtatgggcaaagttcatataaaaatatgtttgaaaaattattttctgtttcagacgataaaattactaaattgaaagaaaaaattaaaaaatttaaagatgaaaataaaaaactattagaaaaaatttctgttcttgaagaattaatagaggagcaaataaaacaaaaaaatagtagtatacagtatgatgaagaatattttgagaagagagaagagtatctaaaaattcttagtaaaataaatgatgaaatacaaaataatactaaagaaaaaatgaaaatctctgaaaaattaaatacgatattttctgaattaaatcatttagaagaaataaaaaagatgttggagaaaaaaaataagaacttgatgggagtatgtaaacattgtggttcatcttcttcaataacgcaattagcggatagacttacagttatgaataatattgatgaaataagctatcaaattgatactactagaaaaagcatggaattagagcaacaaacaatgaatgagtttattgaaagagaaaagaaagtaaaaaatatttataatgagtatatgagtataataaaaagagaaccagacttaaaatccattgatagttatattcaaaattcagcagaaagtttggcaagtgatgttcttataaaaaagaaagaaaaagcaggaacaaaagtaggaacaaatattgtagaaataaagaaaaatgaaagtttattgcgtactttggaatctaaacaacaaaagaaaacagctgaaatatctaaaaaatatgaagaattgtttttagatataatatcaagctcattaacttcaatttcaaattatacattaaaagactatccttttttaaattttactaaaattaaaggtagtggtaccgatgcaaatcttaaaacttatttagtatacttaatatattttaatttattaaattcatattcagaagtaaagattccttttttaattgattctttcataacaacagagcttgatattgaaaataaaaaagaaatgtttagtgcagtatcaaaatactttttagaattagattctcaaactttttttacagttattgaagaaaatttagaatatataacgaaccatgaaaaatataaaaaacattttatacattcgaaaccaatattaaaagatgaaaattatgaggaaaatttagaagaatttaaattataa

SEQ ID NO: 93544 - DNA, 936 bp, Staphylococcus aureus subsp. aureus TCH130
atggtaagagaaaatggtggagcaaatgctcaaagagggtttaactatcaaaattgtgtaatttctttagtagcaattagaaattataagaaaccaaatttcaaaatttatgttgaagcagatgaagatttcgaagtaaattatggcgatgattatcatgcatgtatacaagttaaaggagaaaaaaatttaacctttaacaagcttttaaaaggtgaaaacgggaagctttcaatatttgaaaaaaatctttcatctgggaaatcagattctgtatataaaatagttgtttttagctttagccgaaaagatatggaaagcatgcaggaacaaacagatgaagaagaactgttttcaaactcttggttactatcaaatgatcaaaaaaataaagtgaataatgatcgtgttgaaaatttttcattggtaaaaacagcatttgataacgatatgaagaatgctaggatatatttaaagggagaattagtacaacaaaatatagttgttgagggtagagccgaagtaatacttaatgaattatttcaacaaattcttcaaaagtctgaaaaaaaagttcaaactgaacaagataaagaactgaaaaaaataacgtcaaaagaattagatttgattttacagaaaataactgcaaaagctcgttttgaaaaagaattaaaaaatttaagatttaattcgttgaaagaagagaaaattaaaaaggaagagaagaaaataattttagaatacatggctgtaaaaaaagctgttataagatttttgaaatctgatgaagaaaagttggaaaataattccattagtacattaatatctgaaacatttaatttgtcagaaatgaattgtttatcagagaatactaaatatgccattgctatatcggcttattgcgatattttagaggagattgcatatgaataa

SEQ ID NO: 93545 - DNA, 780 bp, Staphylococcus aureus subsp. aureus TCH130
atgaataaattaacaataataagtttatcgatacttgataataaagaaaaaaaagcaaataagtttgaattttcagaaaaatctaatttgataattagcgaaaggaacggggaagggaaatctagccttataaaatcaatacagtattgtttaggatcaaatttaaaagcgtttccaaaaggatgggactacaaaaattatgtttttcaattagaaatagttattgataaaaataagatattgattcagagatataataatataataacagttttagatgatgggaaaattaaaaagtttggatacttaaaagactattctgattggtttcaagataagatggagatgaatttaaaattagttagtaagaataaaaatacttctagtttagcttcactggaagctattttgagcccattgtatattgatcaagataaatcatgggatggaattctatataagaactcatttgagggtttagcacaatataaaagtcaaagttttcctaaagaagtatttgaatactatttaggtatttctaataatataatgaatgataaaataaataaactcaataaatatagagagaaatcgaaagaaaaaaaagtgaaaattgaacaagtagatttctatattaaagaaacagatcgattttctcaaatgatcactcaaaaaacagacaagttatctaaagaaaaaatgaagcttgatattttacaacaagacagggaagaattgagaaaattattaacaaaaacaaaaaaagattatcagaagtaa

SEQ ID NO: 93546 - DNA, 936 bp, Staphylococcus aureus subsp. aureus 21259; identical to SEQ ID NO: 93544

SEQ ID NO: 93547 - DNA, 864 bp, Staphylococcus aureus subsp. aureus 21259
atgaataaattaacaataataagtttatcgatacttgataataaagaaaaaaaagcaaataagtttgaattttcagaaaaatctaatttgataattagcgaaaggaacggggaagggaaatctagccttataaaatcaatacagtattgtttaggatcaaatttaaaagcgtttccaaaaggatgggactacaaaaattatgtttttcaattagaaatagttattgataaaaataagatattgattcagagatataataatataataacagttttagatgatgggaaaattaaaaagtttggatacttaaaagactattctgattggtttcaagataagatggagatgaatttaaaattagttagtaagaataaaaatacttctagtttagcttcactggaagctattttgagcccattgtatattgatcaagataaatcatgggatggaattctatataagaactcatttgagggtttagcacaatataaaagtcaaagttttcctaaagaagtatttgaatactatttaggtatttctaataatataatgaatgataaaataaataaactcaataaatatagagagaaatcgaaagaaaaaaaagtgaaaattgaacaagtagattctgtatataaaaattatagttctcaaaaaaacatttcgaaaacgataccaaaagaatttgaagagtttaaaaaacaagtagatttctatattaaagaaacagatcgattttctcaaatgatcactcaaaaaacagacaagttatctaaagaaaaaatgaagcttgatattttacaacaagacagggaagaattgagaaaattattaacaaaaacaaaaaaagattatcagaagtaa

SEQ ID NO: 93548 - DNA, 936 bp, Staphylococcus aureus subsp. aureus CIGC93
atggtaagagaaaatggtggagcaaatgctcaaagagggtttaactatcaaaattgtgtaatttctttagtagcaattagaaattataagaaaccaaatttcaaaatttatgttgaagcagatgaagatttcgaagtaaattatggcgatgattatcatgcatgtatacaagttaaaggagaaaaaaatttaacctttaacaagcttttaaaaggtgaaaaagggaagctttcaatatttgaaaaaaatctttcatctgggaaatcagattctgtatataaaatagttgtttttagctttagccgaaaagatatggaaagcatgcaggaacaaacagatgaagaagaactgttttcaaactcttggttactatcaaatgaccaaaaaaataaagtgaataatgatcgtgttgaaaatttttcattggtaaaaacagcatttgataacgatatgaagaatgctaggatatatttaaagggagaattagtacaacaaaatatagttgttgagggtagagccgaagtaatacttaatgaattatttcaacaaattcttcaaaagtctgaaaaaaaagttcaaactgaacaagataaagaactgaaaaaaataacgtcaaaagaattagatttgattttacagaaaataactgcaaaagctcgttttgaaaaagaattaaaaaatttaagatttaattcgttgaaagaagagaaaattaaaaaggaagagaagaaaataattttagaatacatggctgtaaaaaaagctgttataagatttttgaaatctgatgaagaaaagttggaaaataattccattagtacattaatatctgaaacatttaatttgtcagaaatgaattgtttatcagagaatactaaatatgccattgctatatcggcttattgcgatattttagaggagattgcatatgaataa

SEQ ID NO: 93549 - DNA, 1326 bp, Staphylococcus aureus subsp. aureus CIGC93
atgaataaattaacaataataagtttatcgatacttgataataaagaaaaaaaagcaaataagtttgaattttcagaaaaatctaatttgataattagcgaaaggaacggggaagggaaatctagccttataaaatcaatacagtattgtttaggatcaaatttaaaagcgtttccaaaaggatgggactacaaaaattatgtttttcaattagaaatagttattgataaaaataagatattgattcagagatataataatataataacagttttagatgatgggaaaattaaaaagtttggatacttaaaagactattctgattggtttcaagataagatggagatgaatttaaaattagttagtaagaataaaaatacttctagtttagcttcactggaagctattttgagcccattgtatattgatcaagataaatcatgggatggaattctatataagaactcatttgagggtttagcacaatataaaagtcaaagttttcctaaagaagtatttgaatactatttaggtatttctaataatataatgaatgataaaataaataaactcaataaatataaagagaaatcgaaagaaaaaaaagtgaaaattgaacaagtagattctgtatataaaaattatagttctcaaaaaaacatttcgaaaacgataccaaaagaatttgaagagtttaaaaaacaagtagatttctatattaaagaaacagatcgattttctcaaatgatcactcaaaaaacagacaagttatctaaagaaaaaatgaagcttgatattttacaacaagacagggaagaattgagaaaattattaacaaaaacaaaaaaaagattatcagaagtaagttatgaatgtacttattgtcattcagtactaacaagaggccaatccttaacaaggatggaattagatgataataagatagaaatattattacgaaaagatagtataaatcaagaaataataaaaacagaaaacaatattcaaaagaaattaatagaaattcaaaatcttgagaatcaatttgaactttatcatgaacgtctttcagaattaaagcaattatcgaatattgataattatgtaaatcaaaaagtattacaagaattagaaatattaaaaattgaagaagttattgaattgaaagaaatagatcaggaaataaaaagcttgaaaaatgaaatttcaaagcttaaaaagagtttaaaaactgatttagaaaatattaatcaaaaatttaaaaaactaaaaaataaaatatcactacaaatggaaactacgggactgtctgaaaaaaagtattaa

SEQ ID NO: 93550 - DNA, 543 bp, Staphylococcus aureus subsp. aureus VCU006
gtgaataatgatcgtgttgaaaatttttcattggtaaaaacagcatttgataacgatatgaagaatgctaggatatatttaaagggagaattagtacaacaaaatatagttgttgagggtagagccgaagtaatacttaatgaattatttcaacaaattcttcaaaagtctgaaaaaaaagttcaaactgaacaagataaagaactgaaaaaaataacgtcaaaagaattagatttgattttacagaaaataactgcaaaagctcgttttgaaaaagaattaaaaaatttaagatttaattcgttgaaagaagagaaaattaaaaaggaagagaagaaaataattttagaatacatggctgtaaaaaaagctgttataagatttttgaaatctgatgaagaaaagttggaaaataattccattagtacattaatatctgaaacatttaatttgtcagaaatgaattgtttatcagagaatactaaatatgccattgctatatcggcttattgcgatattttagaggagattgcatatgaataa

SEQ ID NO: 93551 - DNA, 609 bp, Staphylococcus aureus subsp. aureus VCU006
atgaataaattaacaataataagtttatcgatacttgataataaagaaaaaaaagcaaataagtttgaattttcagaaaaatctaatttgataattagcgaaaggaacggggaagggaaatctagccttataaaatcaatacagtattgtttaggatcaaatttaaaagcgtttccaaaaggatgggactacaaaaattatgtttttcaattagaaatagttattgataaaaataagatattgattcagagatataataatataataacagttttagatgatgggaaaattaaaaagtttggatacttaaaagactattctgattggtttcaagataagatggagatgaatttaaaattagttagtaagaataaaaatacttctagtttagcttcactggaagctattttgagcccattgtatattgatcaagataaatcatgggatggaattctatataagaactcatttgagggtttagcacaatataaaagtcaaagttttcctaaagaagtatttgaatactatttaggtatttctaataatataatgaatgataaaataaataaactcaataaatataaagagaaatcgaaagaaaaaaagtga

SEQ ID NO: 93552 - DNA, 936 bp, Staphylococcus aureus M0396; identical to SEQ ID NO: 93548

SEQ ID NO: 93553 - DNA, 609 bp, Staphylococcus aureus M0396; identical to SEQ ID NO: 93551

SEQ ID NO: 93554 - DNA, 405 bp, Staphylococcus aureus subsp. aureus 6850
atgaattatttcaacaaattcttcaaaagtctgaaaaaaaaagttcaaactgaacaagataaagaactgaaaaaaataacgtcaaaagaattagatttgattttacagaaaataactgcaaaagctcgttttgaaaaagaattaaaaaatttaagatttaattcgttgaaagaagagaaaattaaaaaggaagagaagaaaataattttagaatacatggctgtaaaaaaagctgttataagatttttgaaatctgatgaagaaaagttggaaaatagttccattaatacattaatatctgaaacatttaatttgtcagaaatgaattgtttatcagagaatactaaatatgccattgctatatcggcttattgcgatattttagaggagattgcatatgaataa

SEQ ID NO: 93555 - DNA, 1017 bp, Staphylococcus aureus subsp. aureus 6850
atgaataaattaacaataacaagtttatcgatacttgataataaagaaaaaaaagcgaataagttcgaattttcagaaaaatctaatttgataattagcgaaaggaacggggaagggaaatctagccttataaaatcaatacagtattgtttaggatcaaatttaaaagcgtttccaaaaggatgggactacaaaaattatgtttttcaattagaaatagttattgataaaaataagatattgattcagagatataataatataataacagttttagatgatgggaaaattaaaaagtttggatacttaaaagactattctgattggtttcaagataagatggagatgaatttaaaattagttagtaagaataaaaatacttctagtttagcttcactggaagctattttgagcccattgtatattgatcaagataaatcatgggatggaaatctatataagaactcatttgagggtttagcacaatataaaagtcaaagttttcctaaagaagtatttgaatactatttaggtatttctaataatataatgaatgataaaataaataaactcaataaatataaagagaaatcggaagaaaaaaaagtaaaaattgaacaagtagattctgtatataaaaattatagttctcaaaagaacatttcgaaaacgataccaaaagaatttgaagagtttaaaaaacaagtagatttctatattaaagaaacagatcgattttctcaaatgatcactcaaaaaacagacaagttatctaaagaaaaaatgaagcttgatattttacaacaagacagggaagaattgagaaaattattaacaaaaacaaaaaaaagattatcagaagtaagttatgaatgtacttattgtcattcagtactaacaagaggccaatctttaacaaggatggaattagatgataataagatagaaatattattacgaaaagatagtataaatcaagaaataataaaaatagaaaaaatattcaaaagaaattaa

SEQ ID NO: 93556 - DNA, 936 bp, Staphylococcus aureus subsp. aureus CN1; identical to SEQ ID NO: 93544

SEQ ID NO: 93557 - DNA, 615 bp, Staphylococcus aureus subsp. aureus CN1
ttgcatatgaataaattaacaataataagtttatcgatacttgataataaagaaaaaaaagcaaataagtttgaattttcagaaaaatctaatttgataattagcgaaaggaacggggaagggaaatctagccttataaaatcaatacagtattgtttaggatcaaatttaaaagcgtttccaaaaggatgggactacaaaaattatgtttttcaattagaaatagttattgataaaaataagatattgattcagagatataataatataataacagttttagatgatgggaaaattaaaaagtttggatacttaaaagactattctgattggtttcaagataagatggagatgaatttaaaattagttagtaagaataaaaatacttctagtttagcttcactggaagctattttgagcccattgtatattgatcaagataaatcatgggatggaattctatataagaactcatttgagggtttagcacaatataaaagtcaaagttttcctaaagaagtatttgaatactatttaggtatttctaataatataatgaatgataaaataaataaactcaataaatatagagagaaatcgaaagaaaaaaagtga

SEQ ID NO: 93558 - DNA, 600 bp, Staphylococcus aureus subsp. aureus KPL1828
atggtaagagaaaatggtggagcaaatgctcaaagagggtttaactatcaaaattgtgtaatttctttagtagcaattagaaattataagaaaccaaatttcaaaatttatgttgaagcagatgaagatttcgaagtaaattatggcgatgattatcatgcatgtatacaagttaaaggagaaaaaaatttaacctttaacaagcttttaaaaggtgaaaaagggaagctttcaatatttgaaaaaaatctttcatctgggaaatcagattctgtatataaaatagttgtttttagctttagccgaaaagatatggaaagcatgcaggaacaaacagatgaagaagaactgttttcaaactcttggttactatcaaatgaccaaaaaaataaagtgaataatgatcgtgttgaaaatttttcattggtaaaaacagcatttgataacgatatgaagaatgctaggatatatttaaagggagaattagtacaacaaaatatagttgttgagggtagagccgaagtaatacttaatgaattatttcaacaaattcttcaaaagtctgaaaaaaagttcaaactgaacaagataaagaactga

SEQ ID NO: 93559 - DNA, 1326 bp, Staphylococcus aureus subsp. aureus KPL1828; identical to SEQ ID NO: 93549

SEQ ID NO: 93560 - DNA, 936 bp, Staphylococcus aureus M0139; identical to SEQ ID NO: 93544

SEQ ID NO: 93561 - DNA, 1326 bp, Staphylococcus aureus M0139
atgaataaattaacaataataagtttatcgatacttgataataaagaaaaaaaagcaaataagtttgaattttcagaaaaatctaatttgataattagcgaaaggaacggggaagggaaatctagccttataaaatcaatacagtattgtttaggatcaaatttaaaagcgtttccaaaaggatgggactacaaaaattatgtttttcaattagaaatagttattgataaaaataagatattgattcagagatataataatataataacagttttagatgatgggaaaattaaaaagtttggatacttaaaagactattctgattggtttcaagataagatggagatgaatttaaaattagttagtaagaataaaaatacttctagtttagcttcactggaagctattttgagcccattgtatattgatcaagataaatcatgggatggaattctatataagaactcatttgagggtttagcacaatataaaagtcaaagttttcctaaagaagtatttgaatactatttaggtatttctaataatataatgaatgataaaataaataaactcaataaatatagagagaaatcgaaagaaaaaaaagtgaaaattgaacaagtagattctgtatataaaaattatagttctcaaaaaaacatttcgaaaacgataccaaaagaatttgaagagtttaaaaaacaagtagatttctatattaaagaaacagatcgattttctcaaatgatcactcaaaaaacagacaagttatctaaagaaaaaatgaagcttgatattttacaacaagacagggaagaattgagaaaattattaacaaaaacaaaaaaaagattatcagaagtaagttatgaatgtacttattgtcattcagtactaacaagaggccaatccttaacaaggatggaattagatgataataagatagaaatattattacgaaaagatagtataaatcaagaaataataaaaatagaaaacaatattcaaaagaaattaatagaaattcaaaatcttgagaatcaatttgaactttatcatgaacgtctttcagaattaaagcaattatcgaatattgataattatgtaaatcaaaaagtattacaagaattagaaacattaaaaattgaagaagttattgaattgaaagaaatagatcaggaaataaaaagcttaagaaatgaaatttcaaagcttaaaaagagtttaaaaactgatttagaaaatattaatcaaaaatttaaaaaactaaaaaataaaatatcactacaaatggaaactacgggactgtctgaaaaaaagtattaa

SEQ ID NO: 93562 - DNA, 936 bp, Staphylococcus aureus COAS6020; identical to SEQ ID NO: 93544

SEQ ID NO: 93563 - DNA, 609 bp, Staphylococcus aureus COAS6020
atgaataaattaacaataataagtttatcgatacttgataataaagaaaaaaaagcaaataagtttgaattttcagaaaaatctaatttgataattagcgaaaggaacggggaagggaaatctagccttataaaatcaatacagtattgtttaggatcaaatttaaaagcgtttccaaaaggatgggactacaaaaattatgtttttcaattagaaatagttattgataaaaataagatattgattcagagatataataatataataacagttttagatgatgggaaaattaaaaagtttggatacttaaaagactattctgattggtttcaagataagatggagatgaatttaaaattagttagtaagaataaaaatacttctagtttagcttcactggaagctattttgagcccattgtatattgatcaagataaatcatgggatggaattctatataagaactcatttgagggtttagcacaatataaaagtcaaagttttcctaaagaagtatttgaatactatttaggtatttctaataatataatgaatgataaaataaataaactcaataaatatagagagaaatcgaaagaaaaaaagtga

SEQ ID NO: 93564 - DNA, 936 bp, Staphylococcus aureus M0413; identical to SEQ ID NO: 93548

SEQ ID NO: 93565 - DNA, 1326 bp, Staphylococcus aureus M0413; identical to SEQ ID NO: 93549

SEQ ID NO: 93566 - DNA, 936 bp, Staphylococcus aureus M0486; identical to SEQ ID NO: 93548

SEQ ID NO: 93567 - DNA, 1326 bp, Staphylococcus aureus M0486; identical to SEQ ID NO: 93549

SEQ ID NO: 93568 - DNA, 936 bp, Staphylococcus aureus UCIM6080; identical to SEQ ID NO: 93544

SEQ ID NO: 93569 - DNA, 609 bp, Staphylococcus aureus UCIM6080; identical to SEQ ID NO: 93563

SEQ ID NO: 93570 - DNA, 936 bp, Staphylococcus aureus subsp. aureus 21267; identical to SEQ ID NO: 93548

SEQ ID NO: 93571 - DNA, 1326 bp, Staphylococcus aureus subsp. aureus 21267; identical to SEQ ID NO: 93549

SEQ ID NO: 93572 - DNA, 936 bp, Staphylococcus aureus subsp. aureus 21311; identical to SEQ ID NO: 93548

SEQ ID NO: 93573 - DNA, 1674 bp, Staphylococcus aureus subsp. aureus 21311
atgaataaattaacaataataagtttatcgatacttgataataaagaaaaaaaagcaaataagtttgaattttcagaaaaatctaatttgataattagcgaaaggaacggggaagggaaatctagccttataaaatcaatacagtattgtttaggatcaaatttaaaagcgtttccaaaaggatgggactacaaaaattatgtttttcaattagaaatagttattgataaaaataagatattgattcagagatataataatataataacagttttagatgatgggaaaattaaaaagtttggatacttaaaagactattctgattggtttcaagataagatggagatgaatttaaaattagttagtaagaataaaaatacttctagtttagcttcactggaagctattttgagcccattgtatattgatcaagataaatcatgggatggaattctatataagaactcatttgagggtttagcacaatataaaagtcaaagttttcctaaagaagtatttgaatactatttaggtatttctaataatataatgaatgataaaataaataaactcaataaatataaagagaaatcgaaagaaaaaaaagtgaaaattgaacaagtagattctgtatataaaaattatagttctcaaaaaaacatttcgaaaacgataccaaaagaatttgaagagtttaaaaaacaagtagatttctatattaaagaaacagatcgattttctcaaatgatcactcaaaaaacagacaagttatctaaagaaaaaatgaagcttgatattttacaacaagacagggaagaattgagaaaattattaacaaaaacaaaaaaaagattatcagaagtaagttatgaatgtacttattgtcattcagtactaacaagaggccaatccttaacaaggatggaattagatgataataagatagaaatattattacgaaaagatagtataaatcaagaaataataaaaacagaaaacaatattcaaaagaaattaatagaaattcaaaatcttgagaatcaatttgaactttatcatgaacgtctttcagaattaaagcaattatcgaatattgataattatgtaaatcaaaaagtattacaagaattagaaatattaaaaattgaagaagttattgaattgaaagaaatagatcaggaaataaaaagcttgaaaaatgaaatttcaaagcttaaaaagagtttaaaaactgatttagaaaatattaatcaaaaatttaaaaaactaaaaaataaaatatcactacaaatggaaactacgggactgtctgaaaaaaaagtattaaactttaataaattaaatggtagcggaacatttctaaataaagatttattaacattatatctggtttatatgaaccttctagatagtatggaagattttggtttgccatttgctattgattcatttgtaaaaaatgagacagactcaatagcattagaaaaaatgtttggtgcaattgataaatattttttgacattaaataaccaaacatttttttcaataataaaagaaaatttaaagtttatagaaaatcctgttaatgagataaaaatagagagacctttattaaaagagaaatttttttctgatatagagaaagaactaattcaaaatttaaatattttatag

SEQ ID NO: 93574 - DNA, 936 bp, Staphylococcus aureus
atggtaagagaaaatggtggagcaaatgctcaaagaggatttaactatcaaaattgtgtaatttctttagtagcaattagaaattataagaaaccaaatttcaaaatttatgttgaagcagatgaagatttcgaagtgaattatggcgatgattatcatgcatgtatacaagttaaaggagaaaaaaatttaacctttaacaagcttttaaaaggtgaaaacgggaagctttcaatatttgaaaaaaatctttcatctgggaaatcagattctgtatataaaatagttgtttttagctttagccgaaaagatatggaaagcatgcaggaacaaatagatgaagaagaactgttttcaaactcttggttactatcaaatgaccaaaaaaataaagtgaataatgatcgtgttgaaaatttttcattggtaaaaacagcatttgataacgatatgaagaatgctaggatatatttaaagggagaattagtacaacaaaatatagttgttgagggtagagccgaagtaatacttaatgaattatttcaacaaattcttcaaaagtctgaaaaaaaagttcaaactgaacaagataaagaactgaaaaaaataacgtcaaaagaattagatttgattttacagaaaataactgcaaaagctcgttttgaaaaagaattaaaaaatttaagatttaattcgttgaaagaagagaaaattaaaaaggaagagaagaaaataattttagaatacatggctgtaaaaaaagctgttataagatttttgaaatctgatgaagaaaagttggaaaatagttccattaatacattaatatctgaaacatttaatttgtcagaaatgaattgtttatcagagaatactaaatatgccattgctatatcggcttattgcgatattttagaggagattgcatatgaataa

SEQ ID NO: 93575 - DNA, 1326 bp, Staphylococcus aureus
atgaataaattaacaataacaagtttatcgatacttgataataaagaaaaaaaagcaaataagttcgaattttcagaaaaatctaatttgataattagcgaaaggaacggggaagggaaatctagccttataaaatcaatacagtattgtttaggatcaaatttaaaagcgtttccaaaaggatgggactacaaaaattatgtttttcaattagaaatagttattgataaaaataagatattgattcagagatataataatataataacagttttagatgatgggaaaattaaaaagtttggatacttaaaagactattctgattggtttcaagataagatggagatgaatttaaaattagttagtaagaataaaaatacttctagtttagcttcactggaagctattttgagcccattgtatattgatcaagataaatcatgggatggaaatctatataagaactcatttgagggtttagcacaatataaaagtcaaagttttcctaaagaagtatttgaatactatttaggtatttctaataatataatgaatgataaaataaataaactcaataaatataaagagaaatcggaagaaaaaaaagtaaaaattgaacaagtagattctgtatataaaaattatagttctcaaaagaacatttcgaaaacgataccaaaagaatttgaagagtttaaaaaacaagtagatttctatattaaagaaacagatcgattttctcaaatgatcactcaaaaaacagacaagttatctaaagaaaaaatgaagcttgatattttacaacaagacagggaagaattgagaaaattattaacaaaaacaaaaaaaagattatcagaagtaagttatgaatgtacttattgtcattcagtactaacaagaggccaatctttaacaaggatggaattagatgataataagatagaaatattattacgaaaagatagtataaatcaagaaataataaaaatagaaaaaaatattcaaaagaaattaatagaaattcaaaatcttgagaatcaatttgaactttatcatgaacgtctttcagaattaaagcaattatcgaatattgataattatgtaaatcaaaaagtattacaagaattagaaacattaaaaattgaagaagttattgaattgaaagaaatagatcaggaaataaaaagcttgagaaatgaaatttcaaagattaaaaagagtttaaaaactgatttaaaaaatattaatcaaaaatttgaaaaactaaaaaagaaaatatcactacaaatagaaactacgggactgtctgaaaaaaagtattaa

SEQ ID NO: 93576 - DNA, 936 bp, Staphylococcus aureus MRSA_CVM43477; identical to SEQ ID NO: 93544

SEQ ID NO: 93577 - DNA, 1674 bp, Staphylococcus aureus MRSA_CVM43477
atgaataaattaacaataataagtttatcgatacttgataataaagaaaaaaaagtaaataagtttgaattttcagaaaaatctaatttgataattagcgaaaggaacggggaagggaaatctagccttataaaatcaatacagtattgtttaggatcaaatttaaaagcgtttccaaaaggatgggactacaaaaattatgtttttcaattagaaatagttattgataaaaataagatattgattcagagatataataatataataacagttttagatgatgggaaaattaaaaagtttggatacttaaaagactattctgattggtttcaagataagatggagatgaatttaaaattagttagtaagaataaaaatacttctagtttagcttcactggaagctattttgagcccattgtatattgatcaagataaatcatgggatggaattctatataagaactcatttgagggtttagcacaatataaaagtcaaagttttcctaaagaagtatttgaatactatttaggtatttctaataatataatgaatgataaaataaataaactcaataaatatagagagaaatcgaaagaaaaaaaagtgaaaattgaacaagtagattctgtatataaaaattatagttctcaaaaaaacatttcgaaaacgataccaaaagaatttgaagagtttaaaaaacaagtagatttctatattaaagaaacagatcgattttctcaaatgatcactcaaaaaacagacaagttatctaaagaaaaaatgaagcttgatattttacaacaagacagggaagaattgagaaaattattaacaaaaacaaaaaaaagattatcagaagtaagttatgaatgtacttattgtcattcagtactaacaagaggccaatccttaacaaggatggaattagatgataataagatagaaatattattacgaaaagatagtataaatcaagaaataataaaaatagaaaacaatattcaaaagaaattaatagaaattcaaaatcttgagaatcaatttgaactttatcatgaacgtctttcagaattaaagcaattatcgaatattgataattatgtaaatcaaaaagtattacaagaattagaaacattaaaaattgaagaagttattgaattgaaagaaatagatcaggaaataaaaagcttaagaaatgaaatttcaaagcttaaaaagagtttaaaaactgatttagaaaatattaatcaaaaatttaaaaaactaaaaaataaaatatcactacaaatggaaactacgggactgtctgaaaaaaaagtattaaactttaataaattaaatggtagcggaacatttctaaataaagatttattaacattatatctggtttatatgaaccttctagatagtatggaagattttggtttgccatttgctattgattcatttgtaaaaaatgagacagactcaatagcattagaaaaaatgtttggtgcaattgataaatattttttgacattaaataaccaaacatttttttcaataataaaagaaaatttaaagtttatagaaaatcctgttaatgagataaaaatagagagacctttattaaaagagaaatttttttctgatatagagaaagaactaattcaaaatttaaatattttatag

SEQ ID NO: 93578 - DNA, 936 bp, Staphylococcus aureus; identical to SEQ ID NO: 93548

SEQ ID NO: 93579 - DNA, 1629 bp, Staphylococcus aureus
atgaataaattaacaataataagtttatcgatacttgataataaagaaaaaaaagcaaataagtttgaattttcagaaaaatctaatttgataattagcgaaaggaacggggaagggaaatctagccttataaaatcaatacagtattgtttaggatcaaatttaaaagcgtttccaaaaggatgggactacaaaaattatgtttttcaattagaaatagttattgataaaaataagatattgattcagagatataataatataataacagttttagatgatgggaaaattaaaaagtttggatacttaaaagactattctgattggtttcaagataagatggagatgaatttaaaattagttagtaagaataaaaatacttctagtttagcttcactggaagctattttgagcccattgtatattgatcaagataaatcatgggatggaattctatataagaactcatttgagggtttagcacaatataaaagtcaaagttttcctaaagaagtatttgaatactatttaggtatttctaataatataatgaatgataaaataaataaactcaataaatataaagagaaatcgaaagaaaaaaaagtgaaaattgaacaagtagattctgtatataaaaattatagttctcaaaaaaacatttcgaaaacgataccaaaagaatttgaagagtttaaaaaacaagtagatttctatattaaagaaacagatcgattttctcaaatgatcactcaaaaaacagacaagttatctaaagaaaaaatgaagcttgatattttacaacaagacagggaagaattgagaaaattattaacaaaaacaaaaaaaagattatcagaagtaagttatgaatgtacttattgtcattcagtactaacaagaggccaatccttaacaaggatggaattagatgataataagatagaaatattattacgaaaagatagtataaatcaagaaataataaaaacagaaaacaatattcaaaagaaattaatagaaattcaaaatcttgagaatcaatttgaactttatcatgaacgtctttcagaattaaagcaattatcgaatattgataattatgtaaatcaaaaagtattacaagaattagaaatattaaaaattgaagaagttattgaattgaaagaaatagatcaggaaataaaaagcttgaaaaatgaaatttcaaagcttaaaaagagtttaaaaactgatttagaaaatattaatcaaaaatttaaaaaactaaaaaataaaatatcactacaaatggaaactacgggactgtctgaaaaaaaagtattaaactttaataaattaaatggtagcggaacatttctaaataaagatttattaacattatatctggtttatatgaaccttctagatagtatggaagattttggtttgccatttgctattgattcatttgtaaaaaatgagacagactcaatagcattagaaaaaatgtttggtgcaattgataaatattttttgacattaaataaccaaacatttttttcaataataaaagaaaatttaaagtttatagaaaatcctgttaatgagataaaaatagagagacctttattaaaagagaaatttttt

SEQ ID NO: 93580 - DNA, 936 bp, Staphylococcus aureus; identical to SEQ ID NO: 93548

SEQ ID NO: 93581 - DNA, 1674 bp, Staphylococcus aureus; identical to SEQ ID NO: 93573

SEQ ID NO: 93582 - DNA, 936 bp, Staphylococcus aureus; identical to SEQ ID NO: 93548

SEQ ID NO: 93583 - DNA, 1624 bp, Staphylococcus aureus
atgaataaattaacaataataagtttatcgatacttgataataaagaaaaaaaagcaaataagtttgaattttcagaaaaatctaatttgataattagcgaaaggaacggggaagggaaatctagccttataaaatcaatacagtattgtttaggatcaaatttaaaagcgtttccaaaaggatgggactacaaaaattatgtttttcaattagaaatagttattgataaaaataagatattgattcagagatataataatataataacagttttagatgatgggaaaattaaaaagtttggatacttaaaagactattctgattggtttcaagataagatggagatgaatttaaaattagttagtaagaataaaaatacttctagtttagcttcactggaagctattttgagcccattgtatattgatcaagataaatcatgggatggaattctatataagaactcatttgagggtttagcacaatataaaagtcaaagttttcctaaagaagtatttgaatactatttaggtatttctaataatataatgaatgataaaataaataaactcaataaatataaagagaaatcgaaagaaaaaaaagtgaaaattgaacaagtagattctgtatataaaaattatagttctcaaaaaaacatttcgaaaacgataccaaaagaatttgaagagtttaaaaaacaagtagatttctatattaaagaaacagatcgattttctcaaatgatcactcaaaaaacagacaagttatctaaagaaaaaatgaagcttgatattttacaacaagacagggaagaattgagaaaattattaacaaaaacaaaaaaaagattatcagaagtaagttatgaatgtacttattgtcattcagtactaacaagaggccaatccttaacaaggatggaattagatgataataagatagaaatattattacgaaaagatagtataaatcaagaaataataaaaacagaaaacaatattcaaaagaaattaatagaaattcaaaatcttgagaatcaatttgaactttatcatgaacgtctttcagaattaaagcaattatcgaatattgataattatgtaaatcaaaaagtattacaagaattagaaatattaaaaattgaagaagttattgaattgaaagaaatagatcaggaaataaaaagcttgaaaaatgaaatttcaaagcttaaaaagagtttaaaaactgatttagaaaatattaatcaaaaatttaaaaaactaaaaaataaaatatcactacaaatggaaactacgggactgtctgaaaaaaaagtattaaactttaataaattaaatggtagcggaacatttctaaataaagatttattaacattatatctggtttatatgaaccttctagatagtatggaagattttggtttgccatttgctattgattcatttgtaaaaaatgagacagactcaatagcattagaaaaaatgtttggtgcaattgataaatattttttgacattaaataaccaaacatttttttcaataataaaagaaaatttaaagtttatagaaaatcctgttaatgagataaaaatagagagacctttattaaaagagaaat

SEQ ID NO: 93584 - DNA, 936 bp, Staphylococcus aureus; identical to SEQ ID NO: 93548

SEQ ID NO: 93585 - DNA, 873 bp, Staphylococcus aureus
atgaataaattaacaataataagtttatcgatacttgataataaagaaaaaaaagcaaataagtttgaattttcagaaaaatctaatttgataattagcgaaaggaacggggaagggaaatctagccttataaaatcaatacagtattgtttaggatcaaatttaaaagcgtttccaaaaggatgggactacaaaaattatgtttttcaattagaaatagttattgataaaaataagatattgattcagagatataataatataataacagttttagatgatgggaaaattaaaaagtttggatacttaaaagactattctgattggtttcaagataagatggagatgaatttaaaattagttagtaagaataaaaatacttctagtttagcttcactggaagctattttgagcccattgtatattgatcaagataaatcatgggatggaattctatataagaactcatttgagggtttagcacaatataaaagtcaaagttttcctaaagaagtatttgaatactatttaggtatttctaataatataatgaatgataaaataaataaactcaataaatataaagagaaatcgaaagaaaaaaaagtgaaaattgaacaagtagattctgtatataaaaattatagttctcaaaaaaacatttcgaaaacgataccaaaagaatttgaagagtttaaaaaacaagtagatttctatattaaagaaacagatcgattttctcaaatgatcactcaaaaaacagacaagttatctaaagaaaaaatgaagcttgatattttacaacaagacagggaagaattgagaaaattattaacaaaaacaaaaaaaaagattatcagaagtaagttatga

SEQ ID NO: 93586 - DNA, 936 bp, Staphylococcus aureus subsp. aureus; identical to SEQ ID NO: 93544

SEQ ID NO: 93587 - DNA, 615 bp, Staphylococcus aureus subsp. aureus; identical to SEQ ID NO: 93557

SEQ ID NO: 93588 - DNA, 936 bp, Staphylococcus aureus subsp. aureus; identical to SEQ ID NO: 93544

SEQ ID NO: 93589 - DNA, 615 bp, Staphylococcus aureus subsp. aureus; identical to SEQ ID NO: 93557

SEQ ID NO: 93590 - DNA, 936 bp, Staphylococcus aureus; identical to SEQ ID NO: 93544

SEQ ID NO: 93591 - DNA, 609 bp, Staphylococcus aureus; identical to SEQ ID NO: 93563

SEQ ID NO: 93592 - DNA, 936 bp, Staphylococcus aureus; identical to SEQ ID NO: 93548

SEQ ID NO: 93593 - DNA, 1674 bp, Staphylococcus aureus; identical to SEQ ID NO: 93573

SEQ ID NO: 93594 - DNA, 936 bp, Staphylococcus aureus; identical to SEQ ID NO: 93548

SEQ ID NO: 93595 - DNA, 609 bp, Staphylococcus aureus; identical to SEQ ID NO: 93551

SEQ ID NO: 93596 - DNA, 405 bp, Staphylococcus aureus
atgaattatttcaacaaattcttcaaaagtctgaaaaaaaaagttcaaactgaacaagataaagaactgaaaaaaataacgtcaaaagaattagatttgattttacagaaaataactgcaaaagctcgttttgaaaaagaattaaaaaatttaagatttaattcgttgaaagaagagaaaattaaaaaggaagagaagaaaataattttagaatacatggctgtaaaaaaagctgttataagatttttgaaatctgatgaagaaaagttggaaaataattccattagtacattaatatctgaaacatttaatttgtcagaaatgaattgtttatcagagaatactaaatatgccattgctatatcggcttattgcgatattttagaggagattgcatatgaataa

SEQ ID NO: 93597 - DNA, 1587 bp, Staphylococcus aureus
ttgataattagcgaaaggaacggggaagggaaatctagccttataaaatcaatacagtattgtttaggatcaaatttaaaagcgtttccaaaaggatgggactacaaaaattatgtttttcaattagaaatagttattgataaaaataagatattgattcagagatataataatataataacagttttagatgatgggaaaattaaaaagtttggatacttaaaagactattctgattggtttcaagataagatggagatgaatttaaaattagttagtaagaataaaaatacttctagtttagcttcactggaagctattttgagcccattgtatattgatcaagataaatcatgggatggaattctatataagaactcatttgagggtttagcacaatataaaagtcaaagttttcctaaagaagtatttgaatactatttaggtatttctaataatataatgaatgataaaataaataaactcaataaatataaagagaaatcgaaagaaaaaaaagtgaaaattgaacaagtagattctgtatataaaaattatagttctcaaaaaaacatttcgaaaacgataccaaaagaatttgaagagtttaaaaaacaagtagatttctatattaaagaaacagatcgattttctcaaatgatcactcaaaaaacagacaagttatctaaagaaaaaatgaagcttgatattttacaacaagacagggaagaattgagaaaattattaacaaaaacaaaaaaaagattatcagaagtaagttatgaatgtacttattgtcattcagtactaacaagaggccaatccttaacaaggatggaattagatgataataagatagaaatattattacgaaaagatagtataaatcaagaaataataaaaacagaaaacaatattcaaaagaaattaatagaaattcaaaatcttgagaatcaatttgaactttatcatgaacgtctttcagaattaaagcaattatcgaatattgataattatgtaaatcaaaaagtattacaagaattagaaatattaaaaattgaagaagttattgaattgaaagaaatagatcaggaaataaaaagcttgaaaaatgaaatttcaaagcttaaaaagagtttaaaaactgatttagaaaatattaatcaaaaatttaaaaaactaaaaaataaaatatcactacaaatggaaactacgggactgtctgaaaaaaaagtattaaactttaataaattaaatggtagcggaacatttctaaataaagatttattaacattatatctggtttatatgaaccttctagatagtatggaagattttggtttgccatttgctattgattcatttgtaaaaaatgagacagactcaatagcattagaaaaaatgtttggtgcaattgataaatattttttgacattaaataaccaaacatttttttcaataataaaagaaaatttaaagtttatagaaaatcctgttaatgagataaaaatagagagacctttattaaaagagaaatttttttctgatatagagaaagaactaattcaaaatttaaatattttatag

SEQ ID NO: 93598 - DNA, 936 bp, Staphylococcus aureus
atggtaagagaaaatggtggagcaaatgctcaaagagggtttaactatcaaaattgtgtaatttctttagtagcaattagaaattataagaaaccaaatttcaaaatttatgttgaagcagatgaagatttcgaagtaaattatggcgatgattatcatgcatgtatacaagttaaaggagaaaaaaatttcacctttaacaagcttttaaaaggtgaaaaagggaagctttcaatatttgaaaaaaatctttcatctgggaaatcagattctgtatataaaatagttgtttttagctttagccgaaaagatatggaaagcatgcaggaacaaacagatgaagaagaactgttttcaaactcttggttactatcaaatgaccaaaaaaataaagtgaataatgatcgtgttgaaaatttttcattggtaaaaacagcatttgataacgatatgaagaatgctaggatatatttaaagggagaattagtacaacaaaatatagttgttgagggtagagccgaagtaatacttaatgaattatttcaacaaattcttcaaaagtctgaaaaaaaagttcaaactgaacaagataaagaactgaaaaaaataacgtcaaaagaattagatttgattttacagaaaataactgcaaaagctcgttttgaaaaagaattaaaaaatttaagatttaattcgttgaaagaagagaaaattaaaaaggaagagaagaaaataattttagaatacatggctgtaaaaaaagctgttataagatttttgaaatctgatgaagaaaagttggaaaataattccattagtacattaatatctgaaacatttaatttgtcagaaatgaattgtttatcagagaatactaaatatgccattgctatatcggcttattgcgatattttagaggagattgcatatgaataa

SEQ ID NO: 93599 - DNA, 609 bp, Staphylococcus aureus; identical to SEQ ID NO: 93551

SEQ ID NO: 93600 - DNA, 936 bp, Streptococcus oralis
atggtaaaagataatgggggatcaattgcgcaaaaaggctttaattatcaaaattgcgttatatctttagttgcgattagaaactataataagtccaatttttcaatatatgttgagacggatgaggattttgaagttacttatgatgatagctatcatgcttatatacaggtcaaaggtcagaaaaacatgagtctcaaaaagttattacaagaaacaaaggaacgaccttctatctttgaaaagaatctttcttcagggacaagcgattctatttataaaattgtagtatataattttaaagaaagcgatttaaaagaaatgcaagaacagatagatacagaagaacttttttctagttcatggctgttatctgataatcaaaagaaggaagttaataatccgaaggtagataattttgctttggtaaaaactgcttttgataataacattatcaatgctaaaacatttttaaagggagagatggcaaatcaaagggtttctattgataatagagatgatgtaattattaacgaattattgcagcaaattgtccaaaaatctgaaaaagaagtgcatacgattgcagataaagaactcaaaaagattacatcagaagagctaaatttaatcttacaaaaagtaactgcaaaggcacgatttgataaagaacttgataaatttggttttactgaaattaagaatgagaaaataaagaaagaagaaaaaaagattatattagaatatataactgctaaaaaatctgtcgttaattttttgaacagtgataaaaatagtttagaaaatgaatcggtaacaacgttaatacctaaaacatttatgttatctgaaatgggaacattatcagaaaacagtagatatgctgtaggaatatcggcgtattgcgatattttggagggaattgctaatgagtag

SEQ ID NO: 93601 - DNA, 1311 bp, Streptococcus oralis
atgaggctggaattagtcaacaaaagcagtgataaagcaagtttagcttctgttgaagccctttttagtccaatgtatattgatcaggataaagcatgggatggtaaattatttaaagattcatttgaaagtttaggacggtataaatcaaatgattttcccaaaaatgtttttgattattatctaggcatatctgatagtcaaatcgttgataaagaaagtaaaaaaaatgagtatttaaggcaattagaattagtaaatggaagaatcaatcaggttcaatcagtatataaaacatatcgtactaaaaataaaattactgagacagttcctaaagatttcaaagacctacaaaaagaattagatttttatattaccgaaacagataagttttctataaaaattaccgataagactggggaattatctaaagaaaagataaatcttgatatattaaatcaagatttagaagagcttaaaaagttatcaagtaagattaaggagagattttctgaaattagacatgaatgtgtttattgccattctatcctaactagacaacaatccctaacacgcttagaactggaagacaatgaacttgcaatcaagagtcgaatagatagtatttctcagcaaattatgaaatctaaaagaatagttcaagaaaaagaagaagctataaaacagctacaagaacagtttaatcaatatcatgaacgtttaactgaactgaaacaattatctgatattgatgagtatgtgaatcaaaatgttttatctgaactaaaaaagttagagattcaagaaacttcggaaaaatcaaatcttgacaaattgattggtgacattacaaaagaaataaggatgctcaaaaaagagcttaatcagagagcgaaaacaattgaaggagattatgaagcacttaaaaatgaactttcaattctaattggttcaacaggtatcacagataaaaaattccgtaattttgataagttaaagggcagtggaacaaatttaaataaagatttattggtaatttttctcgtttatatgaacttgattgatagtaaatctatcacaagtctgccatttgctattgattcattcgtaaaaaatgaaactgatgaaaaggttttgaaaaaaatgttcgacgcaataaattcaaaatttctaagtttaaaaagtcaaacgttcttttcgattattagagataatttgaaatatgttgattcgaaagttaatcaggttaacatagaaagcccattattaaagcgtgaatattatagcgatctgtctaaagaaattatataa

SEQ ID NO: 93602 - DNA, 942 bp, Streptococcus suis
atggtagcggataacggtggagcaaatgccataaaaggaatgaattaccagaatgcggtgattagcttggtagctattagaaactatgaaaaagagggatttgaactgattcttgaagctgacgatgattttgaggttctttatgacaattatcatgcctatatccaagttaaaggcgagcagaaaatgagcttgagtaaaatgctgaatcagaagaaggagggaggtaagaagaaaaaatcaatgttggataaacattttgaagtgggagatagtaaatcaacatataagtttgttgtttataattttactcaatcagatttggataaaatgaaagaaacagatgatgagctttttaatagttcgttgaaattatcaaaagcacaagaaaaacggataaataactcaaaaacaaaaagattttcaataataaaaactccatttgaaaagaatatgctagaggctcaaaactatttacttggagagatggcgaactcaggcatagcagttgacaatagagttaatcaagttttaggtgaattaactacaataatctatagaaaatcagagtacactattaaagaagaatcagataaaaagtataaaaaattagtgtcaaaggaactaaaagatattcttttaaaagtttctgcaatggagatgtttgatgaaattgttaaggacttgccttatactccattaaaaaaaagtcggataaaaacagaaaaattgaagatttctacacaacaaacgtttctaaaacaatctgttatagagtatattcaatccaacttatattcagaattggaggatttaacggttgaggatttgataaatagatgtatagaattagatatgtttagtaatgtagataataatatgcgtattgctctaatcgtttcatcatattgtgatattattgaggagataacttttggttaa

SEQ ID NO: 93603 - DNA, 1677 bp, Streptococcus suis
ttggttaattttattattaaaagtcttgttataattgattacgaatcccaaaaagctaataagttcaattttggggctcacgctaatttaattgttagtgcaaccaatactactgggaagtccagtatactaaaatcactttactatgctttgggagtgagcttaaaatcgatccctgataaatgggatattgataattatatttttcaaattataattaaaattgatgaagttgaatatacaatagaacgtcataataaaataatgtctgtaaaagataacggagaagtaataatattcaaagattttaaagagtattcaacttggttacagaatgttttaaagatgaatctaactcttgttaattctagaaatgacaatttctcccacgcttatgctagtgcgatttttgctccaatatacatagatcaagactcttcttgggacggagtattgtataaaaatacttttaatgatttaggacagtacaaatcaccgaactttcaaaaagatgttgttgcttattatctcggattggcagatacagaattaaaagaatatcagcaaaagaaaacagagatcaagcaacaactaaattacaaaaagatttctattgatgaaataacgaatgtctataatggatacaaagaaaaatttgatgtttcagaaaatgttacttctaatgtaagtgatttagaaaatcaagtaaatgaattcataaatgaaacgaataaattatcaatggcaatttcaaaatctttgaaaaaaatttcaaaatatacagaggaattagatattgagaaacaggatgaggcggagctgacgaagataatcacagctattaatgaaagattggagaaaattgactacgagtgtagctattgccattcaaaattaactagagaacaatcgttaactagattggaattgaatgatgatttatcagaaatacatgtaaaggaaagtgaaataaaacagaaaatcttaattttggaagataacgtaggaaaagagcgtagctatcttcaaagtctaaatcaaaaatttgtcacttataaagaaaggatttcagagattaatgaaatactgacgataaaagattatgtaaatcaaaaagttttaaaagaattaggtgatttgagaagacaagaagataatcaatatagtatgcttaaaagaactgatgacgatttatcaaaaagcatcagaatgattcaagcagaattacgtaaaacaagaagtgcgttgagtacagaatttgaaattcttaaaaataacatcacaaaagatgtgagaacaactggaattactaatcgagagtttggtgatttctcaaaagtcagtggcagtggaactgaacacaataagagtttactatctttatatttaatttattttcaattgataagtaaaaattctgcatataaatttccaatgacgattgattcattcaccaaaaatgaacttgatgagatttcggaagaaaacatgtacaaagccattagagagtatttccttactatcccaaatcaaacattttttgcaataattaaagataatctcaaatatattgattgtccagatgctaatgtgattgaggttgaaaaaccaatattattaagtgaaaagtacaaggagttatcagaaaagttatttgcctatacagagaaaaactaa

SEQ ID NO: 93604 - DNA, 957 bp, Streptococcus mutans SM1
atgaaggaaaggaagaaatatatggcaaaagataatggtggagcaattgcacaaaagggatttaattatcaaaattatgttgtatccttagttgcaattagaaattacaaaaaacctaatttttcaatatatgtagaggcagatgaagattttgaagttatgtatgatgatgattatcatgcttgtattcaggttaaaggacaaaaaggcatgagtattaaaaaattattgagtactactaataataaaccgtcaatctttgaaaaaaatttatcgtctggtacaaatgactctaagtataaaattgtggtgtataattttaatgaagaagacttgaaggaaatgcaggagcaaatagatacagaggaacttttccatagctcatggctattatctgatagtcagaaaaataaggttagcaatcccagaacaaaaaacttttcgttagtgaaaactgattttgataagaataccagcgctgccagaacatttttaaaaggggaattagcaaatcagaaaatttctattgataatagagatgatgtaatccttgatgaattattacagcaaattatccaaaaatcagaaaaagaaatacactcagatgctgataaagaacttaaaaagattacatcagaagaattaaatctaattttacaaaaaataactgcaaaggcaaggtttgataaagagctaaaaaaatttggatttacatctataaaaaatgaaaagattaaacgagaagaaaaaaagattatcttagaatatatgactgctaaaaaagctgttattagttttttaaaaagcgatgaagacagattagaaaacgaagaaatgactattttgatacccaaatcgtttgatttatctgaaatgcagacattatcggagaatagcaagtatgctattggagtatcagcgtactgcgatattttggaggggattgctaatgaataa

SEQ ID NO: 93605 - DNA, 1659 bp, Streptococcus mutans SM1
atgaataaactagtaattaaaagtcttttaatagtagactatgaaaacaaaaaagctaataaatttagattttctgattcagcaaatctaatagtcagtagtacaaacggtgaaggaaagtctagtctagttaaatcaatttattatgctttgggagccaatcttaagtcattcccaaaaggttggaacaatagcgattatatctttcagctggaagtctctattgatgataaggattttttgataaaaagacacaataaagttatttcaatttcagacaacggaagagttcaggtgtttgaaaacttcaaagaatattcttcatggtttcaaaaaaagttgggcatgaatttggagttggttagtaaaaatagcgatacccctagtttagcatctgttgaggctcttctgagcccaatgtatattgaccaagataaatcatgggatgggaaattatttaaagactcatttgaaggtttaggacgatataaaccaagtgactttccaaaaaatgttattgattattatttaaaaacatttgatagtaagattcttgataaagaaagtgaaaagaatgagtattcaaaacagttggatttagtcaatggaaaaattactcaaattcaatctgtatatgaaacatatcgttctcaaaagaatgttacagaaacagtccctaaagattttgaagaactgaaaaaggaattggacttttatattcgggaaacagacaaattttcaaaagagattactaagaaaacgagtgagctatctgaagaaatagtaaaccttgatattttacaacaagatttagaggaactcaagaaattatcaagtaagactaagaaaagattttctaatattaaacataaatgcgtttattgccattcggtattaacaagagaacagtccttaacacgattagagttagcagataatgaacttgctatcagcgttagaatggatgaaatttcccaacaaattgacaaatctgaaagaaaagttcaggaaaaagaaggagcaatcgaacgactggaagaacaattttatcaatatcatgaacgtttagcggagttaaaacaactatctaatattgatgaatatgtaaatcaaaacgttttatcggaactgaaaaagttagaaattcaagaaaatctagaaaaaataaaacttgattcaaatattagtgaactcaaaaaagaagtcatcaaactcaaaaaagaatttaaccagagggctaaagaaattgaaggagagtatgaagaacttaaaaatgagctctctgttcaaatcggttctgcaggaattactgataaaaaatttcgtaattttgataaattaaagggaagtggaacaaatttaaataaggatttattgacaattttccttgtttatatgaacttaatagatagtaaatctaacatcagtctgccttttgctattgattcatttgtaaaaaatgagactgatgaaaaggttttggaaaagatgttttctgcgatagatacaaaatttttaaatttaaaaagtcaaacattcttttcagttattgaagaaaatttaaggtatgttagtccaaacattaatcaagtaaaaattagtaaacctttattgagagatgatttgtataaaaaattagaaaccgaagttattcaataa

SEQ ID NO: 93606 - DNA, 936 bp, Streptococcus mutans 2VS1
atggcaaaagataatggtggagcaattgcacagaagggattcaactatcaaaattgtgttgtgtctttagttgcaattaggaattataagaagcctaatttttcaatatatttagaagcagatgaagactttgaagttacatatgatgataactatcatgcttatatccaagttaaagggcaaaaaagcatgagtatcaaaaaattattaagtactactaataataaaccatctatttttgaaaaaaatctatcatctgggacagatgattctatttataaaattgtggtatataattttaacgaaaaagatttaaaggaaatgcaggagcagactgatacagaggaactttttcaaagctcttggttgttgtctgatagtcaaaaggatcaggtcaacaatccacgaacggataatttttctttagtaaagactgcttttgataataatatcaatgatgctagaacatttctaaaaggtgaattagcgaatcagaacatttctattgatgatagggatgatattattctcaatgagttattgcagcaaattgttcaaaaatcggaaaaagaaagacaaacagaagccgataaagaacttaaaaagattacttcagaagaattgaatttaattttacagaaagtaaccgcaaaggctcgatttgataaagaacttgataaatttggattcaccgaaattaagaatgagaaaataaaaaaagaagaaaaaaagattattttagaatacatgacaaccaaaaaagctgttatcaatcttttgaaaaatgatgaaaacagtctggaaaatgaagaaataactacgttaatacctaaaacatttacattgtccgaaatgcagacattatcggagaatagcaaatacgccattagtatatcagcgtactgtgatattttggagggaattgctaatgagtag

SEQ ID NO: 93607 - DNA, 1659 bp, Streptococcus mutans 2VS1
atgagtagactaataataaaaagtctgttgatagtagactataaaaatgaaaaagccaataaatttgtattttctgattcagcgaatctgatagtcagcagtacaaatggtgaagggaagtctagtctagttaagtcaatttattatgctctaggagcaaatcttaaatcatttcctaaggattggaatgttgacaattatatctttcagttagaagttcttattgatggtaaaaaattttggacaaaaagacataataaagttatttcaatttcagataatggaaaagttcagctatttgaaaatttcaaagaatattctacttggcttcaaaagaagctgggaatgaatttggagttagtaaataaaaatagtgataagcctagtttagcttctgttgaagctcttttaagtccaatgtatattgaccaagataaatcatgggatggtaaattatttaaagactcgtttgaaagtttaggccagtacaagtcaaatgattttccaaaaaatgtttttgattattatttgggtatttctaacagtcaaattactgataaagagagtgaaaaaaatgaatatttaaagcaattggaattagtaaacgggaaaatcactcaagttcaatctgtatatgaaacatatcgctcccaaaagaatattacagaaaccatccctaaagattttgaaggattgaaaaaagaattagccttctatattcaggaaacaaatagattttcaaaagagataactaagaaaactgaagaattatctaaagaaaaaataaagcttgatatttttaaacaagacttagaggagctcaaaaagctatcaagtaaaactaaaaagagattttctgaaatcaaacatgagtgtgtttattgtcattcaatattaacaagagaacaatccttaacacgattagaattagaagataatgaacttgctataagtatccgtaaagacagtgtttttcagcaaattatgaaatctgaaagagttgttcaggaaaataaagaagcaatcgaacaattgcaagaacaattcaaccaatatcataaacgtctggcagagctaaaacagctatcagatattgatgaatatgtgaatcagaatgttttatcagaacttaaaaagttagaaattcaagaaagtgatgaaaaagcgaaacttgatacgctcatcagtgagctcgcaaaagaaatcagaaaacttaaaaaagaacttaatcagagagctaaggaaattgaaggagagtatgaagaacttaagaatgaactttcaatccagattggatcagtaggaatcattgataaaaaattcaggaattttgataagttaaagggaagcggaacaaatttaaacaaagatttattgatactttttcttgtttatatgaatttagttgataataaatctaattttggtttaccttttgctattgactcatttgtgaaaaatgaaacggacacaaaagttttagaaaaaatgtttggtgtaataaatagtaaatttttaagtttgaaaaatcagacattcttttcaattattgaagaaaacttaaaatacattgattcaaaagttaatgaagtaaaaattaataaacctttattgagagatgatttgtataaaaagttagaaatcgaagttattcaataa

SEQ ID NO: 93608 - DNA, 936 bp, Streptococcus agalactiae GB00226
atggcaaaagataatggtggggcaattgcacaaaagggattcaattatcaaaattgtgttgtgtccttagttgcaattagaaattacaaaaaacctaatttttcaatatatgtagaggcagacgaagattttgaagttatgtacgatgatgattatcatgcctatattcaggttaaaggacaaaaaggcatgagtattaaaaaattattgagtaccactaataataaaccgtcaatctttgaaaaaaatctatcgtctggtacagatgactctaagtataagattgtggtgtataattttaatgaaaaagacttgaaggaaatgcaggagcaaatagatacagaggaacttttctatagctcatggctattatctgatagtcagaaaaataaagttagcaatcctaaaacaaaaaacttttcgttagtgaaaactgattttgataacaatatcagcgctgctaggacatttttaaaaggggaactagcgaatcagaaaatttctattgataatagagatgatgtaatccttgatgaattattacagcaaattatccaaaaatcagaaaaagaaatacactcagatgctgataaagaacttaaaaagattacatcagaagaattaaatctaattttacaaaaaataactgcaaaagcaaggtttgataaagagttaaaaaaatttggatttacatctataaaaaacgaaaagattaaacgagaagaaaaaaagattatcttagaatatatgactgctaaaaaagctgttattagtttttttaaaagcgatgaagacagattagaaaacgaagaaatgactattttgatacccaaatcgtttgatttatctgaaatgcatacattatcggagaatagtaagtatgctattgggatatcagcgtactgcgatattttggaggggattgctaatgaataa

SEQ ID NO: 93609 - DNA, 1662 bp, Streptococcus agalactiae GB00226
atgaataaactagtaataaaaagtcttttgatagtagactatgaaaacaaaaaagctaataaatttagattttctgattcagcaaatctaatagtcagtagtacaaacggcgagggaaagtctagtctagttaaatcaatttattatgctttgggagccaatcttaagtctttcccaaaaggttggaacaatagcgattatatctttcagctggaagtctctattgatgataaggattttttgataaaaagacacaataaagttatttcaatttcagacaatggaagagttcaggtgtttgaaaatttcaaagaatattcttcatggtttcaaaaaaagttgggcatgaatctggagttggttagtaaaaatagcgacacccctagtttagcatctgttgaggctcttctgagcccaatgtatattgaccaagataaatcatgggacgggaaattatttaaagactcatttgaaggtttaggacgatataaaccaagtgactttccaaaaaatgttattgattattatttaaacatttctgatagtaagattcttgacaaagaaagtgaaaagaatgagtattcaaaacagttggatttagtcaatggaaaaattactcaaattcaatctgtatatgaaacatatcgttctcaaaagaatgttacagaaacagtccctaaaaattttgaagaactgaaaaaagaattgaacttttatattcgggaaacagataagttttcaaaagagattactgaaaaaataggtgaactatccaaagaaagaataaaacttgatatcttacaacaagatttagaggaactcaagaaattatcaagtaagactaagaaaagattttctaatattaaacacgaatgcgtttattgtcattcgattttaacaagggaacaatccttaacgcgattggagttagcagataatgaacttgctatcaacgttagaatggatgaaatttcccaacaaattgacaaatctgaaagaaaagttcaggaaaaagaaggggcaatcgaacgactggaagaacaattttatcagtatcatgaacgtttagcagagttaaaacaactatctaatattgaagaatatgtaaatcaaaatgttttatcggaactgaaaaagttagaaattcaagaaaatctagaaaaaacaaaacttgattcaaatattagtgaactcaaaaaagaagtcatcaaactaaaaaaagaacttaaccagagggctaaagaaattgaaggagagtatgaagaacttaaaaatgagctctctgttcaaatcggttctgcaggaattactgataaaaaatttcgtaattttgataaattaaagggaagtggaacaaatttaaataaggatttattgacatttttccttgtttatatgaacttaatagatagtaaatctaacatcagtctgccttttgctattgattcatttgtaaaaaatgagactgatgaaaaggttttggaaaagatgttttctgcgataaatacaaaatttttaaatttaaaaagtcaaacattcttttcagttatcaaagataatttgaagtatattgattcaagagttagtcaagtaaatatagaaagtccactgttgaaaagtgaatactatgacagactttctaaagaaattataaagtcataa

SEQ ID NO: 93610 - DNA, 936 bp, Streptococcus agalactiae GB00899; identical to SEQ ID NO: 93608

SEQ ID NO: 93611 - DNA, 1662 bp, Streptococcus agalactiae GB00899; identical to SEQ ID NO: 93609

SEQ ID NO: 93612 - DNA, 936 bp, Streptococcus agalactiae BSU165; identical to SEQ ID NO: 93608

SEQ ID NO: 93613 - DNA, 1662 bp, Streptococcus agalactiae BSU165; identical to SEQ ID NO: 93609

SEQ ID NO: 93614 - DNA, 936 bp, Streptococcus agalactiae CCUG 91; identical to SEQ ID NO: 93608

SEQ ID NO: 93615 - DNA, 1662 bp, Streptococcus agalactiae CCUG 91; identical to SEQ ID NO: 93609

SEQ ID NO: 93616 - DNA, 936 bp, Streptococcus agalactiae; identical to SEQ ID NO: 93608

SEQ ID NO: 93617 - DNA, 1662 bp, Streptococcus agalactiae; identical to SEQ ID NO: 93609

SEQ ID NO: 93618 - DNA, 936 bp, Streptococcus agalactiae; identical to SEQ ID NO: 93608

SEQ ID NO: 93619 - DNA, 1662 bp, Streptococcus agalactiae; identical to SEQ ID NO: 93609

SEQ ID NO: 93620 - DNA, 936 bp, Streptococcus agalactiae; identical to SEQ ID NO: 93608

SEQ ID NO: 93621 - DNA, 1662 bp, Streptococcus agalactiae; identical to SEQ ID NO: 93609

SEQ ID NO: 93622 - DNA, 936 bp, Streptococcus agalactiae; identical to SEQ ID NO: 93608

SEQ ID NO: 93623 - DNA, 1662 bp, Streptococcus agalactiae; identical to SEQ ID NO: 93609

SEQ ID NO: 93624 - DNA, 936 bp, Streptococcus agalactiae; identical to SEQ ID NO: 93608

SEQ ID NO: 93625 - DNA, 1662 bp, Streptococcus agalactiae; identical to SEQ ID NO: 93609

SEQ ID NO: 93626 - DNA, 936 bp, Streptococcus agalactiae; identical to SEQ ID NO: 93608

SEQ ID NO: 93627 - DNA, 1662 bp, Streptococcus agalactiae; identical to SEQ ID NO: 93609

SEQ ID NO: 93628 - DNA, 936 bp, Streptococcus agalactiae; identical to SEQ ID NO: 93608

SEQ ID NO: 93629 - DNA, 1662 bp, Streptococcus agalactiae; identical to SEQ ID NO: 93609

SEQ ID NO: 93630 - DNA, 936 bp, Streptococcus agalactiae; identical to SEQ ID NO: 93608

SEQ ID NO: 93631 - DNA, 1662 bp, Streptococcus agalactiae; identical to SEQ ID NO: 93609

SEQ ID NO: 93632 - DNA, 936 bp, Streptococcus pneumoniae
atggcaaaagacaatggtggagcaattgcgcaaaagggattcaattatcaaaattgtgttatatctttagttgcgattagaaactataataagtccaatttttcaatatatgttgagacggatgaggattttgaagttacttatgatgatagctatcatgcttatatacaggtcaaaggtcagaaaaacatgagtctcaaaaagttattacaagaaacaaaggaacgaccttctatctttgaaaagaatctttcttcagggacaagcgattctatttataaaattgtagtatataattttaaagaaagcgatttaaaagaaatgcaagaacagatagatacagaagaacttttttatagttcatggctgttatctgataatcaaaagaaggaagttaataatccgaaggtagataattttgctttggtaaaaactgcttttgataataacattatcaatgctaaaacatttttaaagggagagatggcaaatcaaagggtttctattgataatagagatgatgtaattattaacgaattattgcagcaaattgtccaaaaatctgaaaaagaagtgcatacgattgcagataaagaactcaaaaagattacatcagaagagctaaatttaatcttacaaaaagtaactgcaaaggcacgatttgataaagaacttgataaatttggttttactgaaattaagaatgagaaaataaagaaagaagaaaaaaagattatattagaatatataactgctaaaaaatctgtcgttaattttttgaacagtgataaaaatagtttagaaaatgaatcggtaacaacgttaatacctaaaacatttatgttatctgaaatgggaacattatcagaaaacagtagatatgctgtaggaatatcggcgtattgcgatattttggagggaattgctaatgagtag

SEQ ID NO: 93633 - DNA, 1656 bp, Streptococcus pneumoniae
atgagtaggatgaccataaaaagtcttttaatagcagattacgagaacgaaaaagcgaacaaatttgtattttctgattcagcaaacctaatagttagtagtacgaatggtgaagggaaatctagtctagttaaatcaatttactattccttaggagcaaacctcaaatcatttcccaagggttggaatgcggacaattttatttttcaattagaagtttttattgatggtaatgaatttttgatcaagagacataataaagttatttctgttttagataataatgaagtcaaactgtttgaaaactttgcagaatactatttgtggtttcaagagaaacttaaaatgaggctggaattagtcaacaaaagcagtgataaagcaagtttagcttctgttgaagccctttttagtccaatgtatattgatcaggataaagcatgggatggtaaattatttaaagattcatttgaaagtttaggacggtataaatcaaatgattttcccaaaaatgtttttgattattatctaggcatatctgatagtcaaatcgttgataaagaaagtaaaaaaaatgagtatttaaggcaattagaattagtaaatggaagaatcaatcaggttcaatcagtatataaaacatatcgtactaaaaataaaattactgagacagttcctaaagatttcaaagacctacaaaaagaattagatttttatattaccgaaacagataagttttctataaaaattactgataagactggggaattatctaaagaaaagataaatcttgatatattaaatcaagatttagaagagcttaaaaagttatcaagtaagattaaggagagattttctgaaattagacatgaatgtgtttattgccattctatcttaactagacaacaatccctaacacgcttagaactggaagacaatgaacttgcaatcaagagtcgaatagatagtatttctcagcaaattatgaaatctaaaagaatagttcaagaaaaagaagaagctataaaacagctacaagaacagtttaatcaatatcatgaacgtttaactgaactgaaacaattatctgatattgatgagtatgtgaatcaaaatgttttatctgaactaaaaaagttagagattcaagaaacttcggaaaaatcaaatcttgacaaattgattggtgacattacaaaagaaataaggatgctcaaaaaagagcttaatcagagagcgaaaacaattgaaggagattatgaagcacttaaaaatgaactttcaattttaattggttcaacaggtatcacagataaaaaattccgtaattttgataagttaaagggcagtggaacaaatttaaataaagatttattggtaatttttctcgtttatatgaacttgattgatagtaaatctatcacaagtctgccatttgctattgattcattcgtaaaaaatgaaactgatgaaaaggttttgaaaaaaatgttcgacgcaataaattcaaaatttctaagtttaaaaagtcaaacgttcttttcgattattagagataatttgaaatatgttgattcgaaagttaatcaggttaacatagaaagcccattattaaagcgtgaatattatagcgatctgtctaaagaaattatataa

SEQ ID NO: 93634 - DNA, 936 bp, Streptococcus pneumoniae; identical to SEQ ID NO: 93632

SEQ ID NO: 93635 - DNA, 1656 bp, Streptococcus pneumoniae; identical to SEQ ID NO: 93633

SEQ ID NO: 93636 - DNA, 936 bp, Streptococcus pneumoniae; identical to SEQ ID NO: 93632

SEQ ID NO: 93637 - DNA, 1656 bp, Streptococcus pneumoniae; identical to SEQ ID NO: 93633

SEQ ID NO: 93638 - DNA, 936 bp, Streptococcus pneumoniae; identical to SEQ ID NO: 93632

SEQ ID NO: 93639 - DNA, 1656 bp, Streptococcus pneumoniae; identical to SEQ ID NO: 93633

SEQ ID NO: 93640 - DNA, 936 bp, Streptococcus pneumoniae; identical to SEQ ID NO: 93632

SEQ ID NO: 93641 - DNA, 1656 bp, Streptococcus pneumoniae; identical to SEQ ID NO: 93633

SEQ ID NO: 93642 - DNA, 936 bp, Streptococcus pneumoniae; identical to SEQ ID NO: 93632

SEQ ID NO: 93643 - DNA, 1656 bp, Streptococcus pneumoniae; identical to SEQ ID NO: 93633

SEQ ID NO: 93644 - DNA, 936 bp, Streptococcus pneumoniae; identical to SEQ ID NO: 93632

SEQ ID NO: 93645 - DNA, 1656 bp, Streptococcus pneumoniae; identical to SEQ ID NO: 93633

SEQ ID NO: 93646 - DNA, 936 bp, Streptococcus pneumoniae; identical to SEQ ID NO: 93632

SEQ ID NO: 93647 - DNA, 1656 bp, Streptococcus pneumoniae; identical to SEQ ID NO: 93633

SEQ ID NO: 93648 - DNA, 1011 bp, Bacillus cereus AH603
atgacagagataaaaaagatacaacaatttgataatggtggcgcagaagcaattaaaggatttaattttcaaaaagcaaacttaatattgctatcaattaataattatcaaaaaaaagactttaaaatatatattgaagcagaagatgacattgttgtaagttacgaaaattatagagcatttatacaagtgaaaaaacaaaagcatacattcagtacaattaccaaacaagaacagaaattaatcaaagctcctgaaggtaaaaaatcaaaaaaattattgccatctattttagaaaaaaatctaaattctggtacagaagacgacacttttaaaatttttgttaaagaaattggatccactgataaaaagcaattgaatataaaaaaacctggggcaatttgttctgaactctatgaattaagtgatacagcaaaagcaaaacttattaaagcgttacctagtgaattaacaaataaaattgagaatttttacctttacgtatctcctattcatgagaatcttgatgaagcagcaaaatatttgacaggttgtttaaatgaaatcgacgtttcggtagataataatagaggaagggcaatcatagctgaattatctttaacaatagatcaaaaagcacaagagattatttttgacgaactgcataaggaacttaaatcaatagatggagattacctttcaaaaattttagttacttgtaaagcgttaaatgaatttgaaagtattttagaatctcttagctataatgcattgttaaaaaaacaaataaaaagtgaaagattaaaaatagaattaaataagactaatttaaaagcggatatgaagcaagctataatagattatattgagaaaaatgaagatttagagactatttcaaataaagatattgtaaattatctagttaaaacatttacatttactgagtctaaaaaaagtacattaatatcagttgccattgaaagtttatgtgagttaggagatgaattataa

SEQ ID NO: 93649 - DNA, 1020 bp, Bacillus cereus AH603
gtgattattgaaagtattattatttacgattatataaatcaaagaataaaaaaatttaattttgaccctcgaacaaatatatttgtaagtgaattaaatacagttggaaaatctagtttaattaaatctatctatcattgtttaggatatagtataaagatttggccaagtaattggaatattaataatatggtatttcaacttgaagtaacaaatggagatagaaaacacctaattactcgccacaagaatttattttacatagatgatagaaaagaaattcttacagagaaagaatattctatgtggctacaaaatttcttaaatattcatataaaaattaaggataaaaaaagtaaactcttatctgatgtttatgctagcgagattcttctacctttttacgtagatcaagataaatcgtggaatggtttcgtctactctaagtcttcggactcatttgctaggtataataacactgtaaaaaatgtatttgatttttattttgaaattgcaaataaaacattaattgatttagcaattgaaaagagtagaattgaaatggaattaagtgatactcacaaaaaaagggacgcactacatcttttagaaaatgaacattcggcattttctaaacctgtaaatgttattaatattatagataaggataagataaacatatctcaaactaataattacctacagatggttaattcgttaaataaatctgttgctgatattgataatgatattattgatctagaaacaaaaattaacgaaataagtagagaaattacagaattaaacaaattaaataaatcatataataaaaaatttaacgaaataaaatatgcatgtatttattgtaattcgaaattgacccatgaacaatcgttaacaagactaaaaataagaaataaccaatatgaaatagtggaacaactcgataacaataaaagattaaaagaagaatataaatataataaggaagaaaaaatatttaaaaaaataaattactaa

SEQ ID NO: 93650 - DNA, 1011 bp, Bacillus cereus
atgacagagataacggagatacaagaatttgacaatggtggagcagaagcaattaaaggattcaattttcaaaaggcaaacttaatattactctcaatcaataattatcaaaaaaatgattttaaaatatatatcgaagcagaagatgatattgttgttagttacgagagctatagagcgtttatacaagtgaaaaaacaaaaacacacatttgcttcaatcacaaaacaagaaaagaaagtaagtaaagattctgatggtaaaaagatcatcaaattcttaccatctattttagaaaaaaatctaaagtctggtacagaagaagatatatttaaagtttttgttaaggaaattggtcaaactgataaaaagcaattgaatataaaaaaaccaggtgcagtttgttcagaactttatgaattaagcgacaaggcgaaaacaacacttattaaagcgttaccaaatgcattagtaaacaaaatcgaaaatttttacttttttatatctcctattcatgaggatcttaatgaagcagaaaagtatttgataggatgtttaaatggaattgacgtatcagttgataataatagaggtagagcaatcatagctgagttgtctttgacgatagatcaaaaagcacaagaggttatttttgacgaggtaaataaggaacttaaattaatagatggggattatttttcaaaagtcttagttacttgtaaatcattaaatgaatttgataatattttagaatcacttggctataatgcattgttaaaaaaacaaataaaaaatgaaagattaaagatagagttaaataaaacagatttaaaagaagatatgaaacaagctataactgattatatcgataggactgaagatttagagaatatttcgaataaagacattgttaattatctagttcagagatttatatctactgattctaagaagagtacattaatatcggttgctattgaagggttatgtgagttaggagatgaagaataa

SEQ ID NO: 93651 - DNA, 1677 bp, Bacillus cereus
gtgattattaatagcattattatttatgattatatagataaaagaattaaaaaggttgattttagtcctcaaacgaatatatttgtaagtgaattaaacacagttggaaaatctagtttgattaaatcaatttatcattgtttaggatatagtataaagacttggccgagtaattggaatagtgataatatggtgtttcaactaaaggtaacgaatggtgatagagagcaccaaattactcgccacaaaaatttattttacatagatgatagacaagaaattcttacagaaaaagaatattctatatggcttcaaaactttttaaatatctgtataaaaattaaggataaaaaaaataaacttttatctgatgtgtatgctagcgaaattcttctacctttttacgtagatcaagataaatcgtggaatgggtttgtttactctaagtcctcggattcatttgctaggtataacaatactgtaaagaatgtatttgatttttattttgaaattgccaacaaaacattgattgatttagaaattgaaaaaagtaatgttgaagcggaattaagtaatacgcataaaaaaattgaagcactcaatcttttagaaaatgaacattcagcattttctaaacctgtaaatgttattaacattatagataacgataggatagatgaatttcaaattgataattacttaaagatgattagctcgttaaataaatttgttgctgatattgataatagtattattgagttagaaacaaaaattaaccaagtaagtagagaaataacagaattaaataagttaaagaaatcctataatagtaaatttaatgaaataaaatatgcatgtattcattgtaattcgaaattgacccatgaacagtcactaacgagacttaaaataagaaataaccaatatgaaatagtcgaacaaatcgaaaaaaataaacgtttaaaagaagtatatgaatttagtaaaaaagaaaaaacagctgaaaaggataaattactaaataaaatattagaaactgaaaggatattacagaataataaggaatactctgagttagattcttacatagcagacagggttaaccaggaaataaccaataattatattacagttgaacaaactctttttaatgaagaatatgaaaaagttgatagtattaaaaaggttaataaagaaatttcgagggagaaaaagcttggcaatcaacaaagatctgaaatcaagaaaaaatacgaagaattaataaatgaatatgaaagatatttcaaaggtatcaagttagatgatattaaattttttagctttaaagaggttacaggaagcggaatagatgctaataaaaaaatgctagcattatatactatttatgccaatctactagatgaatactcaagtattagagtaccttttgcgatggactctttcattaaaaatgaaaccgctgctgaattaaaagagcaaatgttcggctttttatccaagtattatttttctatagaggggcagatgttcttttccataatcaatgaaaatgttaaatatttagatcaggaaaataaatacaattttattaatttagagaaacctattttagaagaaataaacgaaaataataaaattttagttaagacatttgaaataattgataaaaaataa

SEQ ID NO: 93652 - DNA, 963 bp, Bacillus atrophaeus
atgtctgaatttgaaaatggaggggcggttgctattaagggatttaatttccaaaaggcagcaattagcttaatagcaattaaaaattaccataaacctaactttcatatatttgtagaagctaaagacgattttgaagtaaagtatgatggttatgaagcttatattcaagtgaaaagtaaaaaactaagtttaaaccaactattaaatactaaagatggaaagtcaatccttgaaaaaaatctaagtaatggaaacaaaaattcatattttaaaatatttgttaaatcattcgctgaaacggatataaaaaaaatgatcgaattgtctgaaggaaatatttgtacacctttatactcgtacaatgacgaacaaaagaaatctattcttgatgagctaaaaaatagtgagaagatagaagagtttgaagacaagttattatctagttatatttatatcccaccttttaaagataaacttgctgaggctattcctgtgttacttggtgaaatggccttgaatgaaatcgatgttagccataaaaggggacaaatagcggtaaatgaactttttactcttattgatcaaaaaagcgaatatattgtgaaaagtgaggaggattttcagaaaaaggcgattttaaaggaggacctaaaaaaagtttttaaactgtcttctaccttagacgcatttgatgaactcttggaatctactttggattcgttctttttaaaaaaacaaattaaaaaagaacagttgaaaataacacacttttactcaatcgaaaagaaagctgctcaagaaaaattgataggttttgatttgtttagtgggacagaagatgaagtaattaaaaatgcagttagaatttgtaataaaagtaaagaattcctgagtttaaacgatccatctaagaaagcgattgtgattgaagtcttggcggaaatgagtgaaggactatga

SEQ ID NO: 93653 - DNA, 1665 bp, Bacillus atrophaeus
atgattatagaaagattgataatattagattatgaaaatgaagttgcaaatgaatttaatttctctaaaaatgttaatgtaattactagtgatggtaccaccgttggaaaatcaagtttgatcaaatctttgtattatgctttaggatttgagattaagcaatttccacatgggtggaattttaaaacaatgcgattccgtttagatgtgcaaattaacgaatcagcttattttattattcgagataattcattattctatgtttcagattcagaaggtgcattaacccttacggagttttcagaatggttacagcaaaagctatctgtgaacatgatgttaaaattaagaaattctactacaaatgaactttcatctgtttatgcaacagaaatattgacaccattttaccttgatcaggataaatcgtggaatggatatatatttaagaatacctcagattcattagggcggtattcaaatattccccaagatattctagagtatgttctgggtatttctaacaaggaaatacttgagaaagaaactgaaaaaggaaataatcaaaaacaagttaatcaaattacttcgaaaataaacgtattaaacagcctccaagaagaatatgctgaacaaaccgaaatgatagattcatcaccttatgatattgatgaactcaaggtaacttttaataatcacttaaaacagttaagtagagtatctaaagaaatttcaaacaaaaagaataagatgctttctttgaaagcaaatcaagatttaaactctcaagataatgtggagctagagaaaatattaaaagttaacaagaaaacatacaaagaggttgaactagaatgtgtgcattgtcactcaaaattaactcttgaacagtcactaacaaggctaaagttaaaaaataatctattagaaatacagaatatgcttgattctaatagaaaggaaaatgaaaaattacaattaggtattgaggagttacaaaccgaaattaaagatttgagttcgaattatgtaattttaacccaacagaaaaaggaaattcaaaatattttaagcctacaaaagtttattgatttggagtccaaaagattagcaaatgaagagttcttaaaagttattgacaaccttaatacaaataaaactaacatagaagaactaatcaagaggctggcaaaagaaataagggagctgaaaaaagatcagaaggagagaaaggctgaaataagtaaaaaatataacgagatattaagtgatattaactttcgttttggtagcactaaattaagtgaggttgaattctttaattttaaggaagttaaaggaagtgggatggataataataaaacgttactagcattgtatattacatacatgagactggtggcagaatacggtatatacactatcccatttggaatagattcctttgtaaagaatgaaattgatgaagctactgtcccaataactttcaaggaagttgaaaggtatgtgttgtctaattctaatcaaactttttttgcaactatctctgaaaacttaaagtacttatctaacctagatacatataatataatgaaattgactaaaccactacttaataaagttaattacaaaaaaatgttatctcaagttagttatattaaataa

SEQ ID NO: 93654 - DNA, 939 bp, Listeria grayi DSM 20601
atgagatttgataatggaggagcaattgctcaaaaaggatttaattatcaaaatgcagtaatatctttagttgctataagaaattataaaaaaccaaatttcgaaatttatgtagaagcatctgaagattttgaagttcaatatgatggaaattatcatgcttatattcaagtaaaaggcacgaagtcgatgtcgttaaaaaaacttttaagcaaatccaagttgaaatctggaggagaaaaaccatcgattattgagaaaaatttaaatagtggtggttcggaagataaatataaaattgttgtctatcattttactgagaatgatttaaaaagaatgcaagaacaacagaatgaagaggagctttttgaaaaatcttatttattttctgatggacaaaaaaaacaaatcaatcatcccaatgcagacaatttatcacttatatgcactaattttaagaatgataagataaatgcaagaacatacttaaaaggggaaatggcagatcaaaatatttcaattgatggtaaatccgatatcttactggatcatctagataggattatttcagaaaaagcagaattcattttaaaaaaagaggatgacaggaattttaaacgtatttctgcagaagaacttaatccaatattacaaaaaactatcgctttagagaaatttggtgtaattttatcaaaatttgactttaatgaatataaaaaagcaaaaataaatttagaaaaaaataagattgtccttgaatatgtctatctcagaaataaagttgttgaaaaattaaagttactagatttggataacctccccgaagttgaggcgatttctgaagtaatgaaattagcggaaagtcaaaaattagatgaaattacgagttatgctgtttgtatctcagcatattgtgatgtcatagaaggggtgagctaa

SEQ ID NO: 93655 - DNA, 1659 bp, Listeria grayi DSM 20601
ttgaaattagtaattaaagaaatcattatttttgattacaataatcaaaaagcaaatcgatttagttttcaaccaggttctaatctgattactagtaactcaaatgaggcaggaaagtctagtttgattaaatcaatttattataccttgggagctagagtctctacatttccaacaggttgggaatacaaaaaatatatttttcaaataaaaatttttataaatgataaagaggttattattaagaggcaagatgaaatttttacagttcaacatgatggaaaaaaagaaatcttttcaaatgaaaaagactttgcaacttggtttcaaaatcaagtaggtatgcaaatgaagttacaagaacaaaaatcttctaaagtatctatagcctatatgaatgcaattttgactccttattttattgatcaagataaatcatggagctcattttataaaaatgcaattgataaggtaggcatgtataaaaatcaaccaaaagtaatatttgaaaatattttaggtgtatctgatgtggaattacaaaatttagagtttgaaagagctcaagcaataaaactaaaggaggatttagtttcaaaaatatcacaagtagattctgtttataaaaactatcaaatacaaaaacaagtaactaaagcagctccagaaaatattgatagtttaaaagaagaaatatcagattatttaaaaataaccgatgagcttagtaatgaaatagagaagtatactgaaaagctatcgaaaaataaaatttctgtggatattaattgtcaagatttagatgaactaaaaaaattactttctaaaactgataaaagatacaaggaagtcgcatttgagtgtacatactgtcattctctcttgacaaaggagcaatctcttacaaggttaacactttcagataatgactttgaaattagaggtagagttcatgagttgaatcacaaaattgaattaggtaagagcgaattaaattcaattgaattggaaatagaaaaattaaaaacatcatattcggaatacaacttaaaaataaaggatttaaaatcggcagtgaaaattgaagactttgtcagtcaaaaggtattatctgaactaaatggcttgaagattcaacagaataaagaaaaatcagtagtcgagagttctatattagaatatactaaagaaattaatcctttaagaaaagaactaaagaaaaagaaaacgattcttaatgaaaactttgagatattaaaaaatagtgtttcaacagaggtcggaacatctaacttgcataataggaaatttttagatttttctgctatcgaaggaggaggtacagcaatgaataaggattttctagttttatatttaacttactcaaaaatgatagataaatatagtgaatttaaatttcctttggcaatggattcttttataaaaaatgaaatcacggatttaaatgaatctaaaatgtttgaggcagtgcagaaacattttattgatttagatattcaaactttcttctcagttatcaataaaaatttgagtcatttagatacatctcactcgtatgcagtgaaaattagtaagcctattttaaatgatgagaattatatttatttacagagtcaaattattgaaatcgatgattaa

SEQ ID NO: 93656 - DNA, 936 bp, Streptococcus mitis
atggcaaaagacaatggtggagcaattgcgcaaaagggattcaattatcaaaattgtgttatatctttagttgcgattagaaactataataagtccaatttttcaatatatgttgagacggatgaggattttgaagttacttatgatgatagctatcatgcttatatacaggtcaaaggtcagaaaaacatgagtctcaaaaagttattacaagaaacaaaggaacgaccttctatctttgaaaagaatctttcttcagggacaagcgattctatttataaaattgtagtatataattttaaagaaagcgatttaaaagaaatgcaagaacagatagatacagaagaacttttttctagttcatggctgttatctgataatcaaaagaaggaagttaataatccgaaggtagataattttgctttggtaaaaactgcttttgataataacattatcaatgctaaaacatttttaaagggagagatggcaaatcaaagggtttctattgataatagagatgatgtaattattaacgaattattgcagcaaattgtccaaaaatctgaaaaagaagtgcatacgattgcagataaagaactcaaaaagattacatcagaagagctaaatttaatcttacaaaaagtaactgcaaaggcacgatttgataaagaacttgataaatttggttttactgaaattaagaatgagaaaataaagaaagaagaaaaaaagattatattagaatatataactgctaaaaaatctgtcgttaattttttgaacagtgataaaaatagtttagaaaatgaatcggtaacaacgttaatacctaaaacatttatgttatctgaaatgggaacattatcagaaaacagtagatatgctgtaggaatatcggcgtattgcgatattttggagggaattgctaatgagtag

SEQ ID NO: 93657 - DNA, 1659 bp, Streptococcus mitis
atgagtaggatgaccataaaaagtcttttaatagcagattacgagaacgaaaaagcgaataaatttgtattttctgattcagcaaacctaatagttagtagtacgaatggtgaagggaaatctagtctagttaaatcaatttactattccttaggagcaaacctcaaatcatttcccaagggttggaatgcggacaattttatttttcaattagaagtttttattgatggtaatgaatttttgatcaagagacataataaagttatttctgttttagataataatgaagtcaaactgtttgaaaactttgcagaatactatttgtggtttcaagagaaacttaaaatgaggctggaattagtcaacaaaagcagtgataaagcaagtttagcttctgttgaagccctttttagtccaatgtatattgatcaggataaagcatgggatggtaaattatttaaagattcatttgaaagtttaggacggtataaatcaaatgattttcccaaaaatgtttttgattattatctaggcatatctgatagtcaaatcgttgataaagaaagtaaaaaaaatgagtatttaaggcaattagaattagtaactggaagaatcaatcaggttcaatcagtatataaaacatatcgtactaaaaataaaattactgagacagttcctaaagatttcaaagacctacaaaaagaattagatttttatattaccgaaacagataagttttctataaaaattaccgataagactggggaattatctaaagaaaaggtaaatcttgatatattaaatcaagatttagaagagcttaaaaagttatcaagtaagattaaggagagattttctgaaattagacatgaatgtgtttattgccattctatcttaactagacaacaatcatccctaacacgcttagaactggaagacaatgaacttgcaatcaagagtcgaatagatagtatttctcagcaaattatgaaatctaaaagaatagttcaagaaaaagaagaagctataaaacagctacaagaacagtttaataaatatcatgaacgtttaactgaactgaaacaattatctgatattgatgagtatgtgaatcaaaatgttttatctgaactaaaaaagttagagattcaagaaacttcggaaaaatcaaatcttgacaaattgattggtgacattacaaaagaaataaggatgctcaaaaaagagcttaatcagagagcgaaaacaattgaaggagattatgaagcacttaaaaatgaactttcaattctaattggttcaacaggtatcacagataaaaaattccgtaattttgataagttaaagggcagtggaacaaatttaaataaagatttattggtaatttttctcgtttatatgaacttgattgatagtaaatctatcacaagtctgccatttgctattgattcattcgtaaaaaatgaaactgatgaaaaggttttgaaaaaaatgttcgacgcaataaattcaaaatttctaagtttaaaaagtcaaacgttcttttcgattattagagataatttgaaatatgttgattcgaaagttaatcaggttaacatagaaagcccattattaaagcgtgaatattatagcgatctgtctaaagaaattatataa

SEQ ID NO: 93658 - DNA, 444 bp, Bacillus thermoamylovorans
atgcttttaaattctgaaggtaatatctgtgatccgctatactcatacagtgatgaacaaaatcaaactattttaaacacgttaaagggaagtagtgatattgaagattttgaaaaaaagttattagcaagttatatttatatacttccttttgaggatagattaatagatgcaatacccgccttgctaggtcaaatggcgttaaaagaaatagatgttagtcacaaaagaggacaaattgcaattaatgaactttttacccttattgatcaaaaaagcgaatatgttgttgagagtgatgaagattacgtgaaaaagaaaattttaaaagaagatttacaggaaattttcagattaacttcaactttagatttttttgattctatactttcatcaacttcatattcagtttttttgaaaaaaagattaaaaaagagcaattga

SEQ ID NO: 93659 - DNA, 351 bp, Bacillus thermoamylovorans
atgattatagaaaaaataattatattagattatgaaaatagggtggcaaatgaatttgaattttcaaaaggtcctaatattattaccagtgatggaacaactgtagggaaatcaagtctaactaaatcattatactatgcattgggatttgagattaaacaatttccgcacggttgggatgttaagacaatgagatttcggatagatatattaattaatggattgtcttattctattattagaaataatgccttattttacgtttcagacaaagaaggagtactaaaccttaaagaattttcagaatggtgtaaacgagcacactatttcagcttatcattttcaaattaa

SEQ ID NO: 93660 - DNA, 963 bp, Bacillus sp. NRRL B-14911
atgagcgattttgaaaacggcggtgcagttgctataaagggctttaattttcaaaaggcagcaattactttcatagcaattaagaattttgataaaccaaactttcatattctagtcgaagcaaaggatgactttgaagttaaatatgatggttatgaggcatatattcaagtaaagagtcagaagttatctttaaaaaaaatcttaaatagtaaagaaggtaaatcaatacttgaaaaaaatctgaggaatggaaacgaagattccttctttaaaattttcgttaaaacatttgtagagtcagatttaaaaagcatgacagaagtctcggatggaaatatttgtactccactatattcttatagtgatgaccaaagaaagactattttgcaagaattgaaggataaggagaatatccataaatttgaagaaaaattgttatccagttatatctatatacctccttttaaggataagttgaatgaggctattccggtattattaggggagatggccttaaaggaaatagatgttagcaataagcgagggcaggttgcaataaatgagctttttacgcttattgatcaaaaaagtgaatatattgtaaagagcgaagaggattataaaaaaaaggaaatcttaaaaggagacctcagagaaatattcaaactctcttcaactattgatgcattcgataaccttcttgaatcaacatcatataatttctttttgaagaaacaggtgaagaaagaacagcttaaaattatgcatttgtattctactgaaaagaatatcgcaaagcaagaattggaagatctcgttgcattcacagggacagaggatgaaattattaataacgctattctaaaatgcaataacaataaaaagtttaatagtttaaatgaaacttccaagaaggcaattattattgaagtcttatcagaaatgagtgaaataatatga

SEQ ID NO: 93661 - DNA, 1665 bp, Bacillus sp. NRRL B-14911
atgataattgagaaactgattattctagattatgaaagcgaagtggcaaatgaatttcacttttcaaaaaatacaaatgtaattacgagtgacggcacaacaatcggtaagtcaagtttaataaaatcattatattatgcattggggtatgatattaaacagtttccaaatgggtggaactacaaaactatgcgatttcgattggatgttattataaatggctcttcatattatattataagaaataattcgttattttatgttacagattctgaagaggcattagatcttaaagagttttcagaatggcttcaaggaaaactttcaattgaaatgaaattaaaattaaaatcatcgagcactaaggaactttcctctgcatattcaacagaaatactaacaccattttatttggaccaagataaatcatggaatggttatattattaaaaactcttctgactcgttaggaagatattctaatatacccggggatattttggaatatactctgggtatttcaaatcgggccattttggaaaaagagaatgaaaagaccaaaaatcaaaaacagataaatcaatattcatcaaaaatagatgttctaaacagtctccaaacagaatattcagacaaagtcgaaatgatagatacctctccttatgaatttgataaattaaaggaaacatttgatataactctaaatcagcttagtaggatttcaaatgaaatatcttcaaagaagaaaaagatatttgctaaaaaagccgaacaagatataaataaccaagataatattgaattagaaaaaatcaaggctgtaaataagaaaaactataaagatgtagagttcgaatgtatccattgtcattcgcatttaaccttggaacagtccttaacaagacttaaactaaataataatgtattagaaatacaaaacatgcttgatatgaataaaaaacaaagtgaagttttacaacaagaaattgaagtattacaagatgaaattttagatcttgatagcaagtatagaatgattactaggaaaaagaaagaaattcaagaaatattgactctccaagaatttattgatttagaatcaaagagactggcgaatgaggaatttttaaaaactatagacaaattatctgatgaaaaagaaaagttagtagactatggcaaagaattagcaaagaaaattaatgcactaaaaaaagatcaaaaaaacagaaagtcagaaattgaaaagcgattttacgaaataataaacgatattaatttgcgtattggaagtaccatattaagcgaagttgaattttttaattatagagaagttaaggggagtggaatggacaacaataaaacattgctggcactatacttaacttatatgagattaattgctgaatttgggatttacactattccatttgggattgattcatttgttaagaatgaagtcgataagaagacgataaaaaccacatttaaagaagtagaaaaatacttcttaactatcccaagtcaaactttttttgtgacaatttctgaaaatctacagtatctttcaaagttagataactataatgtaataaaattgacaaagcctatactacataaaaacaaatacaattatttattatctcaagttaggacgattgattag

SEQ ID NO: 93662 - DNA, 936 bp, Streptococcus gallolyticus subsp. gallolyticus ATCC 43143
atggcaaaagataatggtggagcaattgcacaaaagggattcaattatcaaaattgtgttgtgtccttagttgcaattagaaattacaaaaaacctaatttttcaatatatgtagaggcagacgaagattttgaagttatgtacgatgataattatcatgcctatattcaggttaaaggacaaaaaggcatgagtattaaaaaattattgagtactactaataataaaccgtcaatctttgaaaaaaatctatcgtctggtacagatgactctaagtataagattgtggtgtataattttaatgaagaagacttgaaggaaatgcaggagcaaatagatacagaggaacttttccatagctcatggctattatctgatagtcagaaaaataaggttagcaatcccagaacaaaaaacttttcgttagtgaaaactgattttgataagaataccagcgctgccagaacatttttaaaaggggaattagcaaatcagaaaatttctattgataatagagatgatgtaatccttgatgaattattacagcaaattatccaaaaatcagaaaaagaaatacactcagatgctgataaagaacttaaaaagattacatcagaagaattaaatctaattttacaaaaaataactgcaaaggcaaggtttgataaagagctaaaaaaatttggatttacatctataaaaaatgaaaagattaaacgagaagaaaaaaagattatcttagaatatatgactgctaaaaaagctgttattagttttttaaaaagcgatgaagacagattagaaaacgaagaaatgactattttgatacccaaatcgtttgatttatctgaaatgcggacattatcggagaatagcaagtatgctattggagtatcagcgtactgcgatattttggaggggattgctaatgaataa

SEQ ID NO: 93663 - DNA, 1665 bp, Streptococcus gallolyticus subsp. gallolyticus ATCC 43143
atgaataaactagtaattaaaagtcttttaatagtagactatgaaaacaaaaaagctaataaatttagattttctgattcagcaaatctaatagtcagtagtacaaacggcgagggaaagtctagtctagttaaatcaatttattatgctttgggagccaatcttaagtctttcccaaaaggttggaacaatagcaattatatctttcagctggaagtctctattgatgataaggattttttgataaaaagacacaataaagttatttcaatttcagacaatggaagagttcaggtgtttgaaaacttcaaagaatattcttcatggtttcaaaaaaagttgggcataaatctggagttggttagtaaaaatagcgacacccctagtttagcatctgttgaggctcttctgagcccaatgtatattgaccaagataaatcatgggacgggaaattatttaaagactcatttgaaggtttaggacgatataagccaagtgactttccaaaaaatgttattgattattatttaaacatttctgatagtaagattcttgacaaagaaagtgaaaagaatgagtattcaaaacagttggatttagttaatggaaaaattactcaaattcaatctgtatatgaaacatatcgttctcaaaagaatgttacagaaacagtccctaaaaattttgaagaactgaaaaaagaattgaacttttatattcgggaaacagataagttttcaaaagagattactgaaaaaataggtgaactatccaaagaaagaataaaacttgatatcttacaacaagatttagaggaactcaagaaattatcaagtaagactaagaaaagattttctaatattaaacacgaatgcgtttattgtcattcgattttaacaagggaacaatctttaacgcgattggagttagcagataatgaacttgctatcaacgttagaatggatgaaatttcccaacaaattgaaaaatctgaaagaaaagttcaggaaaaagaaggggcaatcgaacgactggaagaacaattttatcagtatcatgaacgtttagcagagttaaaacaactatctaatattgaagaatatgtaaatcaaaatgttttatcggaactgaaaaagttagaaattcaagaaaatctagaaaaaacaaaacttgattcaaatattagtgaactcaaaaaagaagtcatcaaactcaaaaaagaacttaaccagagggctaaagaaattgaaggagagtatgaagaacttaaaaatgagctctctgttcaaatcggttctgcaggaattactgataaaaaatttcgtaattttgataaattaaagggaagtggaacaaatttaaataaggatttattgacaattttccttgtttatatgaacttaatagatagtaaatctaacatcagtctgccttttgctattgattcatttgtaaaaaatgagactgatgaaaaggttttggaaaagatgttttctgtgataaatacaaaatttttaaatttaaaaagtcaaacattcttttcagttatcaaagataatttgaagtatattgattcaagagttagtcaagtaaatatagaaagtccactgttgaaaagtaaatattatgacagactttctaaagaaattataaagtcagaataa

SEQ ID NO: 93664 - DNA, 951 bp, Streptococcus gallolyticus
atggtaaaggataacggtggtgcaatagctcaaaaagggttccattttcaaaatcatgttatatctttagttgcgataagaaattataagaaaaagaatttttcaatttatgttgaagctgatgatgattttgaagtattatacgatgatgactatcatgcgtatatacaggtaaaaggtcaggctaatatgagtttatctaaattattaaattcccagaatgctaaaccctcaataatggaaaaaaatttaaaagtaggggatgaccaatcaatttataagattgttgtttttgagttcgctactaaagatttaaactcgatgcaatacgataacgatgaattatttagtcaatctatcaagttgtgcgaatcgcaaaaaaataaagttgaaaaagcactaggaaatgatgtttcatcaaaattagccaatttttcaatcgtcaaaactgatttttcaaatgattctaaagtggctcgtaaatatttaaaaggggaacttgttgaccaaaaaatttctgttgataatagagatgatgtgatattagatgagttagatagattgattagtcagaaatcagaatttatattgaaatctgacaaagataaatcttttaaacaaattacttctactgaattagattcgatattgtggaaaatttcctcaaaggcacgttttgaaaaagaactatcgaacttttcttttcccacttttagagaagaaaaaattaaaaaggaagaattgaaaattatagtccaatatatgtcagagaaaaaagctattattaaggaactttctgctgatatatcaagattaaatgaaaaaagtctggttgaaattttgccagatattgaaaaaagtaattgtttaagtggactagaagctaataccaaatatgccattattatttctgcgtattgtgatattctggaggagattgtgaatgagtaa

SEQ ID NO: 93665 - DNA, 1665 bp, Streptococcus gallolyticus
atgagtaatttaatcgttaataaaatatctattgttgattatgagaataaggttgcaaatacattcgatttttctccgaaagcaaatcttatcattagtaaatcaaatggacaaggaaaatctagtttggttaaatcaatttattatggcttaggtgcagaccttaagtcatttccaaatggctgggaacctgaaaaatttatttatcaattagaagtaaccatcggtgaacaagactacaaaataaaaagacagaataaaattatatcaatcagaggagagaaagaatcagtaatttttaaaaataggaaagagtattcaaagtggttacaagaaaagctagagatgtccttagaattagcaacaaggaatagtgaattgagtattgcatattgtggagcgatactaagtcccttttatatagaccaagataaaggatggagtggtagtttatataaagatacattcgaggggttagggcagtataacgcaactgtttttcctagagatgtagttgattattatctgaacttatcaagtagtgagctaaatataaagaaaagccataatgagaaattaaaaaataaaaataagttcttacaagggaaaattgaacaaatccaagcagtttataatacatatgaagaacagaatcaagtaaatgctagctatccaattgatataaaagaattacagcttgaaatggagcaatatctaagagaaaccgatgaaatttctgaaagaattcaaaagataacgaaggaaatcgaaaaaaataagcttaaactagacatattaaaacaagataaagaggaaatttcaaatttattaaatgatacagatgaaaggtttaatgaaattgaatatgaatgttcgtattgccactctatactaacacgagaacaatctttaactcggttagaattagaagataaccgtataacaataatttctaaaaaagaagaacttaccgttaaaattaaacaggcagaagaaacattacaatcttctcagcgacaagtagattcattgaaagaaaaaattgatttgtaccataagcgagtgaaagagattcggtcagtaactgatattgaaagttatattagtcaatcagttttaagtgagcttaatagtcttagggttcaagaagcactccaaaaagatattttagataaggaaatgaaacaagtttcagctgatataaggaagttacaacgtattttaaaagaaaataccgaatcgattcaaggagagtttgaacaactgaagaataaattatctaatttaatcggctccaacgggttagctgataggaaatttagagattacaaaaaaatgactggaggcggtaccaatctaaataaagatttattggctttatatctaacttatatgaacttaatcatagatagaacaaaatttaagctcccacttgctattgattcttttgttaagaatgagacggatagtgattctctgctgaagatgtttgaggccatcaattctagttttttaacattagactcccagactttcttttctgtaattgaagaaaatttagtatatttagataagtcaactaatcaaattcaaatagagtctccactactgagaaaagaatattattctagagtagtaagtgaaattattgaatttgaaaagtaa

SEQ ID NO: 93666 - DNA, 963 bp, Bacillus infantis NRRL B-14911; identical to SEQ ID NO: 93660

SEQ ID NO: 93667 - DNA, 1665 bp, Bacillus infantis NRRL B-14911; identical to SEQ ID NO: 93661

SEQ ID NO: 93668 - DNA, 993 bp, Lactobacillus crustorum JCM 15951
ttggcagataataatggtggagcggtagcaataaaaggatttaattttcaaacaatggctgttatttttttcatagtaaataatattgatgatgataaatttagtgcttatgttgaatctgaggaagactttactttagataagaatgggtataaatcttatgtccaagtgaaagcaagaaagttatcacttaaattactgttaaagacggctcttaaagacagtggagatatagaaccttccattttagaaaaaaatttaagctcggcggatgatggtgaatttctcatttatactaaggaattagcagccaaggatttaaagtcaatgatcaaaaaaagcgatatctttgtaaatgaagaagatgtttatgtgttttctgaagaacagaagaaaagcatagtagacgcatttaaaaaagatggttttggagaatcattaattaaaaatttaaataatagtagactatttgtttctaaatttggcgatagtttgaaagatagtcaaagatatttaataggattgatgagcgaaaagaaaattgatattactggtgatcgtgccaagatggctttaaatgaactgttttttttagtacataaaaaagccgaatatctggtacagaaaggatatgaaaaagacgactatgaaaaaaagaaattaactagtgatgaattaaagtctattttcaaaaaggcggagagcagaagctttttttataaatttgtagaggacacaaattacagtactctttttaaggataaagtaactaaaataagaaatgaaatatttaatgaatactatgtggaaagaaaaatgttgaatactatatttgattctcaaaaattagattttgattgtcccaatcaagatctaattaataaaatgaaattagaattggattctgacaaagataaatttgataattgtgataaatatgtgaaagtttctcttatcattgattatatttcagagagggctgtacaatcatga

SEQ ID NO: 93669 - DNA, 1554 bp, Lactobacillus crustorum JCM 15951
atgagaaaattgattataagggaattgaaaatactagattataaaaatgaagttgcacaaacgtttgattttagtgatgaaataaacatcattgttagcaaaatttcctctacgggaaaatctagcttaattaaatccatattttatgccttaggattcgatataaaacagtttccaaataaatggaatactgagaatatgatatttaaagagtatgtaactattgatggtgtagagcattctattcttagaaaaggcaatctttttaatgtagataataatactgagacatatagttattctcaatattccaagtggcttgcatctcaaatgaatatagatgtaaagttacaaattcaaaatactgggaaatttactgatccttatcctactgaaatgttactttttaattatattgatcaagataaatcatgggacggttttttatataaaaatgtgtctgattctttaaaacagtacggtggtagtaatgctgtaagaggaattttagaatatgaactaggaatatcagataacgatgtatcggaatccaaagagaaaaaagcaaacataaagaatagtcaaagggaaatctctaatgaactaaagataattaatgtgatgattaagaatctttctactgaagataatattcatttaacacctgtagatttaaatgaaattcaaagaagtttaaaaacttggacagaacaaattcaaattgtaaatgataatattgacaggatatacaataaaatacataggtgcaattttaaattaaacgtaatcaatcaagatatttcagagctaaagaagctaaaaagtcaaaataataataaaaaaagtaaaatttttaataaaaatggagaatgtagttattgccactctaagttaaccattgaacaatctttatctagatttgaattagaaaataatgtttttgatattcaaaattcaattatagagaaaactaaagatgcagagaaaatatctttagaactgcaaagtaataagaaattattggatgaaaagattgagtattataattctattgaaaataattctaagattgaatctcaaaagataaaccttgatacatatttgaatcagcaggttaataacggaatacgaaaacaatataatgataagtatactgatgtgttagtaaaaaataaaaaaaatgaagaattattaaaagaaatagattcaaaaattcgaaaaataaatagtgaattaggaaaaagaaaaaaggaaataaaacaatactttggtgaaagtattgctaaaatttcagtgaaattaaattcagaaataataaacgatatacaatttgataagtttaggggaatatctggtagtggaactgaaaataaccgtgctgtactaggcggttatttagcttattttaaaacattagataaatttagtgtttataagttcccatatggactggattctattataaaaactgaaattgatggattatctttaagtcaaatgtatcaaaccattgaggaagaatttttatctttgaatggtagattgcaaatttaa

SEQ ID NO: 93670 - DNA, 993 bp, Lactobacillus crustorum; identical to SEQ ID NO: 93668

SEQ ID NO: 93671 - DNA, 1356 bp, Lactobacillus crustorum
atgatatttaaagagtatgtaactattgatggtgtagagcattctattcttagaaaaggcaatctttttaatgtagataataatactgagacatatagttattctcaatattccaagtggcttgcatctcaaatgaatatagatgtaaagttacaaattcaaaatactgggaaatttactgatccttatcctactgaaatgttactttttaattatattgatcaagataaatcatgggacggttttttatataaaaatgtgtctgattctttaaaacagtacggtggtagtaatgctgtaagaggaattttagaatatgaactaggaatatcagataacgatgtatcggaatccaaagagaaaaaagcaaacataaagaatagtcaaagggaaatctctaatgaactaaagataattaatgtgatgattaagaatctttctactgaagataatattcatttaacacctgtagatttaaatgaaattcaaagaagtttaaaaacttggacagaacaaattcaaattgtaaatgataatattgacaggatatacaataaaatacataggtgcaattttaaattaaacgtaatcaatcaagatatttcagagctaaagaagctaaaaagtcaaaataataataaaaaaagtaaaatttttaataaaaatggagaatgtagttattgccactctaagttaaccattgaacaatctttatctagatttgaattagaaaataatgtttttgatattcaaaattcaattatagagaaaactaaagatgcagagaaaatatctttagaactgcaaagtaataagaaattattggatgaaaagattgagtattataattctattgaaaataattctaagattgaatctcaaaagataaaccttgatacatatttgaatcagcaggttaataacggaatacgaaaacaatataatgataagtatactgatgtgttagtaaaaaataaaaaaaatgaagaattattaaaagaaatagattcaaaaattcgaaaaataaatagtgaattaggaaaaagaaaaaaggaaataaaacaatactttggtgaaagtattgctaaaatttcagtgaaattaaattcagaaataataaacgatatacaatttgataagtttaggggaatatctggtagtggaactgaaaataaccgtgctgtactaggcggttatttagcttattttaaaacattagataaatttagtgtttataagttcccatatggactggattctattataaaaactgaaattgatggattatctttaagtcaaatgtatcaaaccattgaggaagaatttttatctttgaatggtagattgcaaatttaa

SEQ ID NO: 93672 - DNA, 933 bp, Lactobacillus composti DSM 18527 = JCM 14202
atggcaattgataatgggggagcaatcgcacagaaaggttttagttatcaaaatgcggtaatatcattagtggccattcgaaactataagaagtccaattttcaaatctatgttgaggcaagagatgatttcgaagtaacctatgatgccaattatcatgcatatattcaggtgaaagggctaagccgggtcagcctaaataaattacttgcacaatcaaaatcgcaagcaggaaacttgaaacagtcaataatcgaaaagaatcttagcagtggtgatgatgattctaagtataaaattgtagtttacaatttcacaaagagtgatttgagtgatatgcaagaacttgaaacagatgagttgtttgaaagagcttattcgttttcagatgatcaaaagcggaaaataggtaattcttgttctcgggcattatcacttgtggtaacagatttcaagacagattctaaagcagcaagcaagttcctaattggagaaatgcaacatcagaatatctcggtggataataaggctgatattgttctaagcgagctttggcgaattatctctcaaaagtccgagaaagaaatcgttactgaggcagacagggaattgaaaaaaatcactgcgaatgaacttgtcccaattctacaaaaagttagtgccttagaaaaatttgatactgttctaaaaaagtttgattttaacgagttcagaaatgcaaaaataaaaaaagagaaggcaaaaatacttttgcaatatagttcaataaaaagcgaagtggtttcagagatgaaacagtgtgatttagagaacattaatgagacgacattggttactaccctcgtcaattcggatttgctaagtgggttggatactgatgctcaatacgcaatttgtatttcagcatactgcgatattttggaggaggtgtaa

SEQ ID NO: 93673 - DNA, 1656 bp, Lactobacillus composti DSM 18527 = JCM 14202
atgagattatttgttaaaagtattttgatcgtggatcctgagcgtaaagaagcaaacaaatatatcttcggtgagcattctaatttgataatgagtgaaggaaatgaaattgggaaatccagtcttataaaatcaatttattatacgcttggagctccgattaagtcgtttccaaagggatgggattatacgaattttatctttcagatacagtgtgatattgacggaagagcactgaccattcaaagatttaaccaagtttttactgtcgaagttgccaatcgtgtacaaagttttgctaatgaaaaaaatttttcaatttggatgcaaaaacaaatgcatatgaatctaaggttacaaacagcaaattctgaaaaattccatcatgcatacatgaatgctgtattggcacccttctatatcgatcaagacaaatcttgggcaaacttttatcaagatgcatttgaaaatttagcaatgtataaaggacaaccgaaaccaataattgaatattatttaggtctttccaatgggaggctgcttgaattaaacgagcagaaaaaagaacttcacaccgccaaagtaaatctggacggccagattaaacaaattactggtgttcggaattcatacagcgatgataaaaatatagatgtggttagtccagaacaatatattgaacttcaagcagaacttaaccaatatctcaagattactgatgagcttcaacgaaaggtttcaaaactggttaatagaatcacaaaatcaaaaatggatttagattcttatcgccatgattatgatgaactgagaaagttacttttggctacagataaccgttttaaaaaaattgagtatgagtgtacatattgccattcagtattaaccaggcaacaatccctgactaggctagagctttccgataatgattttgaaattaggcagcaaaaggcactattgaatcagaagattatggatgaagaatctaaacttgccactcttgttcaatctgctgagagtttgaagaaagatttcgaagataagaatgccagaattagcgaacttagaagtgcaggtaatattgatagatatgtaagtatcaaagtattaacggagcttgcacaattggctgataagtatcaggttcagttatcacatttggaggccgaaataaagcggattgcaaagagtcaacgtgatgagaagaaaacattagagacaattcacgagagtttagaggcggactatgaaaaaataaaaaacgatatatcggtagatcttggtaccacggacttatcggatcgtcaatttttagacttcaaaaaaatgaaaggcggagggacggcattaaataagtctttactttgcctatacttaatttatctctctcttttatcaaaacattcaaaaacaatttttccaatgactattgattcttttttaaagaacgaaatttccactgagaatgagaacaggatgttcttgtctgttcagaggttctttatgtcattgcataatcaaacatttttttctgttattaagcgcaataaaggaaaattgaacattagtgatagtacagttatatttcttgagaaaccaatgctttctggagatttgtttgatcgattatctttagaattgatatctgaagaatga

SEQ ID NO: 93674 - DNA, 933 bp, Lactobacillus composti DSM 18527 = JCM 14202; identical to SEQ ID NO: 93672

SEQ ID NO: 93675 - DNA, 1656 bp, Lactobacillus composti DSM 18527 = JCM 14202; identical to SEQ ID NO: 93673

SEQ ID NO: 93676 - DNA, 948 bp, Bacillus cellulasensis
atgattgaaattgacaacgggggagccatcgcactaaaaggatttaactatcaaaaagcttccatcatacttgtaatgattcataattttgaaaaagataattttatagtcatacctgaatcgcaagaagattttgaaattcatcttggacaagatacttattttatacaagtgaaaggaacaaaaaaactttccataggtaagttgaagtcaaggcctagcggaaaagcttcaatcatagagaaaaatctttctcctggtaatgttggagatataaggaaaatatttctctgggatatagcggagttaacaaaaaacgaattgataagccaagaaggaacgcttattcctatgaaacacagcctttcattgaaacaaaagacagagattataaatactcttgatttagatgaagaacagaaaaatagaatgaacaatcaatatatatatataaccccttttccaaacgatataaatttggctttaacatttttaaaaggagaaatggttaatgaaaacttgctggtttctaacgatcgagctaaattagttttaggagaactatcattggaaatagatcgtaaaagtgaaatagtagtttctactgaaagtgatgtagaaaggaaaaaaatcgacgggaattatcttaagcaggtattcattaatattaagcaaaaagagatgtttgatgaaattttagataatctctctatcaacacaattatgaaaaaaaaagtaaagaaggagaaattaagaataccactcttgtatcaaaatattaaagagcaaacgaagcaaaaggcagatattaatttacttatgagggagaatgatgagggtgctattaactatctcagagatctattggtagagatagtgccagatatgaagcctacagaactatctattgctttagcaatagactgtttttgtgagttgggagaataa

SEQ ID NO: 93677 - DNA, 1689 bp, Bacillus cellulasensis
atgataataattgctttttctattcttgattttaaaaataaagaagcacaaaattttgactttaaagctgggactaatctaattgttagtaaaggaaataccaaaggtaaatcaagtcttttaaaatcaatgtattatacattaggatttgatgtgcatcaatttcctagtaactggaacataaattttatgtatttccaaatagaagtcttaataaataatgttaaatataatataactagacaaaaaaatatttttagagtaagtgatgtagaagtacctttgaatgtaaaagagtattcagagtggcttcaacataaacttgagattaaaatgcagttagctaatactcatactaagcacttatacgaggcatattcttcggcagtaattttaccattttacatagatcaagacgattcttgggatggcggaatttatagaaatgtaactaatactctgaatcaatatactcgcataccggcagatattttcaaaagtgtttttaatctctccaattacgaacttctggagttgcaaaattcgcttactaattatagtaaagaaaagaatacggtagtgtctacaataaagagtttattaaatgttttggaagattatagacatgaaaacgcagatgtccctactgtttcaaaaattgataaaatagccttaaataaagatatcgatcgctacttgcagatgcaaaatgaattaaatgaacaaatagtaaaatataaaatgaagctattaaacaagcaagaaatgttggatttacaaaagcaagaattgtctgaattagagcagcttttaaaaatgaacaaaaagagatataactctattgaaacagaatgtcaatattgtcattctaaattaacaaaagaacaatctttaacaagacttgatttatcgaataattattttgaaatatcgcttttgaaagaggaaatagaaaaagaagtagtaaaattgactaatgaaattataatattcgaatcacaacaaaattctattgaatctaaaattgatgaaattcatcgtaggattcaaaattctaaagatctacttacgattgatgattatgtaaaagcaactgctaaaaaagaagcatcaaatgaattggaaagtttagttgataaacaagttctttctaaatataatttagaagaaaaaattaaagtattaagaagggaaattaataaactgaagaaagagaaagaaagtttaagagagattattgagcgagattacactgatttggtatttgaaataaaaaaagtgttgaatgatttaaatgatacaaagctggatttatctgaattaaatctggatgaacttaaatttcttgaatttaagaaaatatcggggagtggtatggataaaaataaaaaatttttagcttactatttaatttattttagtttgttgagaaagtatagctcttatataattcccttttgtatggattcgtttattaaaaatgaaattacgggtgagactgcaaaaaagatgtttgaagcaatagaaaaatatttttttgacactaatcagtctttcttttcaatcgtttctgaaaaccttaaacatttagagtttgtagatagttacaataagattaatgttgagggtaagctgttggttagagataaatatgatgagattgctttgaaattcaaatttgatagttaa

SEQ ID NO: 93678 - DNA, 948 bp, Bacillus sp. FJAT-21955; identical to SEQ ID NO: 93676

SEQ ID NO: 93679 - DNA, 1689 bp, Bacillus sp. FJAT-21955; identical to SEQ ID NO: 93677

SEQ ID NO: 93680 - DNA, 966 bp, Bacillus sp. Leaf13
ttggataatggtggtgcaatagcaattaaaggatttaactttcaaaaagcatgcattattttagtagtcctagataattatttaaaggaagacttttatattactgtagaagctgaagatgattttgtagttaaatataaagattatcaagcattcattcaagtaaaaggtcagaacacttcaataaataaaataaaaaaaataaaagaaggaacatcaattattcaaaaaaacatttcatcaggagacagtacagatactcacaaaatctttgtcctgaatttttcaaattcagatataaaacatatggttagaacagagcccggcaacatatgtgataaaatttatagcttcaataacgtgcagttaaaagagttaatttcacatttatcttatgcaaaattgccagatttagatgaacgccttaaaaacacatacatatatatagcatcttttgctaagagcctagatgatgcaattctctatttactcggaaaactcaatcactatgatataagcattgataatcaacgtggtagagggattattgccgagctagcgttaattatagatcaaaaaagcgagaaaaaaattattaatccgtctgataaggaattcaaaaaaatccaatctgattacttcaaagaattattaacaaaaagtcagaaattatctgaattccaagagattttaaaaggattggattattcgattatctttaaaaagaaaatagagcttaaaagaactaaaattgcaattctattcattagcataaaaaaagaaataaagtcagaaattaaaaaaataaaaaattatgaagagctcccagaagcaactattatagatcacattttgtcaatctactcatcaaaatatgagaaaagtttattaatcgccattattatagaaagtttaattgaaattggagatgaaattattgattgttcaggaatttacaatagttga

SEQ ID NO: 93681 - DNA, 1668 bp, Bacillus sp. Leaf13
ttgattgttcaggaatttacaatagttgattatatacaaagaagagcgaacacttttacttttgaatctggagtaaatctatttttaagtaagaataatacgattggtaaatcaagtttaatgaaatctctcttctacaacttaggatttaatataaaaatattccctcaaaattgggatgtaaacagcatgatatttaaagtgaaaatagttcaaaaaggggaaaaatatacaataacgcgaaataaagatcttttttacatcaacgaatcttctaatgccttaagcgaaaaagattatgcactatggttacaagatgtacttgggtcaaaaattctattgaaagaaaaaacatcgaaaaagcttagcagagtttatgctagcgaagtcttactcccattttacatagaccaagataaatcttggaatggttatttatataaaaacacctccgattcatttgggagatactcaaatattcctaaaggagtttttgaatattatctttcgatatcgaatgacagaattttagagttagaaacagataaaaatacccttgaatctgagataaagcacctaaatttacaactaaatgctctaacactattaaactctgaatacaacctaactaaaaatcctaaggcactagctgtagatttagatgaattaaaagttgagatacagttgtatttatcaaaacttaatctcatttctaatcttattgctaaatacaatactgaaatactgtctaatcagcttaatttaaatattgagaaaaacgatgtaattgaactaaaaaaattagctgtttatcataataaccgattcaaagaaataaaaaatatttgtatttattgtaattcacaactaactctaaaacaatcattgactaggttagagattaggaataatatatttgatattcaaaggttaattgatgaaaaaaatataaaaatactaaatttagaaagtaaaatttctaatctagaatcacttaaacagctagaaagccaggcctacaatgaggtgaaaacaacttatgaagaaataagaaaatatatcacttttaatgaatatatagatcaagaggctaatagaaaaatttccaacaaatatttatatttagaatcagacatacataccaatctttcgaaaaaaaacttatgtaaaaaacaaaaagctgacgaaatcagaacactcaagaaacagatagattctctcaaaaatactatcgcccacaggtttaaagaactaattaataaaatttctatatccattacagatttagatataaaagatataaatgttttagactttaaggaaataaagagtagtggaaacgataataataaaaaaatgttagctttatatattatatattcttctatagttgatgaattctcgaaaataaaaatccctataggaatggactcatttattaaaaatgaaactactactaactccaaacaagaaatgtttaaattagtatcagaacactttttcaaactgaataaccaaatttttttctcaattgttaaggaaaatcttaagtacttagataatatcgaaaactaccatattatctcactcgataaaccaattctaaaggaaatagaaccttcaaataatataatacaaaaagaatttggatttatttctataaagtaa

SEQ ID NO: 93682 - DNA, 966 bp, Streptococcus sp. A12
atggttcaagataatggtggagcgatagctcaaaaaggttttaattatcaaaatcatgtcatttcactaacagcgattaggaattatactaagaataattttgagatttttgttgaatctgacgatgactttgaagtattatatgatgataattatcatgcttacatacaggtgaaaggtaagaagaggataggtctaaagagtttattacaaaaacatgaaggtaagtgttctattcttgagaaacacttaaccccgggagatggacattcaaaatataaaattgttgttttccattttacagaaagtgaattatcaaaaatgcaagagaatacttctgaggagttgtttgagcattcattgaaattaagcacagaacaaacagattacattcttgaacaactagatgagagctttagcacaaaactaactaatttttctttagtgaagacaagctttaagaatgattatttagaagcaagaacatatttaaaaggtgaactgattaatcaaggcatctcagtagatggaagagacgatttaattttagatgagttagatagacttattaaacagaaatcagaatatataatagaaaacaaagatgataaaaaattaaaaagaatctcagcaattgaacttcaacctatattgcaaaaaatttcttcaaaggctttgtttgaaagtgaactagataaatttcctttttcatcctatacaaaagcaaaaataaaaaaagaagaggtaaaaattatacaacaatatatgtataaaaaaagacaagtcataggattgttggagagtgatatacatagacttgagactaaagaattgactgaaattgctgaggaaataaaattttgtgacattttaaaatccttagaatctgatacgaaatatgcaatcattatctctgcatattgtgatattgtagaaggagttgccaatgaaccaattaatcattaa

SEQ ID NO: 93683 - DNA, 1668 bp, Streptococcus sp. A12
atgaaccaattaatcattaacaaaataagtatagttgactatgaaaataaaaaggccaatagttttgaatttaatgaaggtcctaatttgataattagtgaacaaaatggccaggggaaatctagcttagttaaatctatctattatggacttggttgtcagttgacctcctttcctaaaggttggaaaccacaaaaatacattattcaactttatgtgctcattaatggagaatcgtatatcattaaaagacacaacaaagtaataagtataaaaagtagtgaagcctcgtttatttttaaaaattttagagattattcagagtggttacagattaaattaggcatgtctttaaaattaacttctaaagcacaatatgaaccaaaatatgtctatgtcgatgctcttatgagtccgttttatgtagaccaagataaaggttggaatggaacattgtataaagaaacttttgatggtctaggtcagtatccggcaagtgtcttccctaaagatttaattgattattatttaggaatatcaaatgaagagctaaataataagaaaagtcaaaaagaggattttagcatcaagagcaggtcgctttcgcagaaaattagtcaaattgaagcggtttataattcttatcaagaacaaaatgaaatagtagaatctttacctaaagatgttaaagagttaaaaatagagattgactactatattaagaaaacaaatgaaatttctttggaaattcaaaaagtaacaaagggtatagaaaaaacgaagctcaaattagatatacatagacaagataaaaatgaattagaactcctattgcaagatacaagtaatcgttttgaagatattaaatatgaatgctcatattgtcattcacatttaaccagagagcaatcattaacaagactcgaactagaggataatagattagctatcaattctcttaaggaatcattagtccagagaatttctcagttagaagaatcactaatagacaaacagagtaaattatatgaattaagcgacaaagtggctgcatatcaaagaaaaattgatgaaataaaggaaataaaagatatagaaaactatattagtcaatctgtcttagttgaattaggaaaactagcccgtaaagaatcaattgccaaagaaatactagataaagaaattgaccaactaaataacgatattagagatttgcagagtgagttaagacatcatatcaatagtcttgaaggcgattatgaagatttgaaaaataatttatcttctttacttgagtccaatggattatctgacagaaggtttagagactataaaaaattaaaaggaagtggaactaacttaaataaggacttgctagcaatatacctaatttatatgaatttaatagcaaataacagtgaatttaagattccatttgctattgactctttcgtaaagaatgaaattgatacaatatcacaagagagaatgtttaaagctataggttcatattttttgacattaaagactcagactttcttttcagtaatcagagaaaatttatataaaattgatggagattattgtaagattagagttgaatcccctcttttaaaagaagatagatatgaagaaatatcaagagaaatcattgaatttggcgtttaa

SEQ ID NO: 93684 - protein, 144 aa, Methanosarcina mazei Go1
MFLIFGIIYCFYFDYKFKGTAPLQIEVQEIKNVNYEHILFLTTYIIPLLSFDISNIRYLLLLFLLLVIICAIYIQTNLFYANPTLALLGYHIYEMTGSRKKELETETYKNIIVITKTNISLNDEVQLLFLSDNIYFGRKYEHID

SEQ ID NO: 93685 - protein, 319 aa, Methanosarcina mazei Go1
MTIYILEGNMNTLIENLNHILRGTISIVVYFKLKNGEVRLADINNNVLPRILTLYKNKISEEIINKENLELLKLSEMDERKNVIYKYDFDKDREPFLSMKQVVEDEEIKTFSISNDTLENIDGIIAKISNSNHGIFLYTKFYPVNLIKPGKSINLFPSDHRLEMFDGKLIQITGKFDILRYNNEYYIKKHEILEKFYQFNDVITERAKSYFEEIIKIKIIENEAKLFSYLENNPSRARKFIKVMASSLVIKKKIPKEQLISFVSNNPKLKDNIETSEDKTKFKLKTNNHCNFFIKLLDDDFLKSELTQEEYEALAKNNV

SEQ ID NO: 93686 - protein, 211 aa, Xanthomonas axonopodis pv. citri str. 306
MRTAFETMVSTKEGAECMQFQFWSAVLLFLGSYLPLAVILMVQDIATKYWSAPLCGWKGQWNCQFQILAHSWLAWGTVAVTFGALLLMVVALRSVRLPHRVHVQEVKAIPNDLINYVLPYVVSFMGLSYADPQKLGGFLVFWVVLFLITYRSGQILMNPLLIVLGWKLYEVKVGLGQSGAIRMARVLKKGPLVPSIQMAEEIQDVYLMRDP

SEQ ID NO: 93687 - protein, 309 aa, Xanthomonas axonopodis pv. citri str. 306
MTDQALQALQEFDLDSAGVHLWVFKSSTKADRFSASFVRIDAALEDALRNFAKAERAMMTEWIPYGHLAQPTENGCLSVSAIETDFALLQALVDRPELEHAIESKDQLKNAIGYLVKFSQEERVLYALRRSPATWKTAYRRKGVVNMLFQNGELSAVEGVDFTLEPGFDLFALDEALLVGNKRAFESMMRYRAGFVNAFGELQDEKQFVSLFTDMAPLVTYVGSNGTHLRRMAVIQERKLYDNPRYLGALREVCEKYQWGVQFDKDGLIIPTKETAAVIMKLLLDQRLISEITAIMYDVPNGHRVDAVE

SEQ ID NO: 93688 - protein, 138 aa, Pseudomonas syringae pv. tomato str. DC3000
MSIFFMTIGVLSLGLLYVGFLAGWSATYIIEEVSDENHEHLAFLTTYIMPLVFTDVDKKRTAINLAVMIFAIGVIYVKTNRFYSNPSLAVIGFRIYKAKIKNEPQKTFVLVSHGRLTNGSKIQYIKLDDDTLLVREII

SEQ ID NO: 93689 - protein, 325 aa, Pseudomonas syringae pv. tomato str. DC3000
MFSGLNTFVGSSSTTAELFFVSETSAAPGATVALTFNRVNLDSNAQTDLASNFKASFRSEVIDISTGLSVLTKISSLFNSSNNVYEYDILPKAPIFETIELISLLTVSSTVNSFDFATQPLEKVKGMVIKLTDGNTNLYLYQHKFPIALHRKSKLSFMSTQRNILKRVGHDVIDINKNIDFFMYNGVHYIVNVKRLEASYGLDAVINNMVNQVIPLIVSLNVIDMSAHANPLEIFDDLKKNKSSMRKIAKILNGRILSVGLTIPQIINVCNDFPVFSRGITFSNNFVDLSSQKKKLIFIRMLNDEAVRSALTNDVSLADDRESAA

SEQ ID NO: 93690 - protein, 201 aa, Methylococcus capsulatus str. Bath
MSTPAVADPSLRLRPWASLVLFLSAYSPLMLILIIKDYDAVNPGWLPQNPVFSGTLLLVAVFSSLAVLRSVKEIDGGLTVTVTKASNKSGDMFGYTIPYMLSFMKVDLGDWQTIVSLVLFLGILFIMAYRTQTVFVNPILALAGYMLIDCTFRRGDKEIQAMVVTRQPLAVGDTCRLERLSHYLYVAARDSSTPEEKRGKA

SEQ ID NO: 93691 - protein, 315 aa, Methylococcus capsulatus str. Bath
MSKPSPKAVLKTIKGYELDKWTATFWLVKRSMANREARYTVLRVNTDAKLQKRLKGYITSQLQGKDFHLAEYDYSNADGDDTLFTIAADATDFPQVEKEINAGFNNAIAKDYAELLNSWAYVIQIEQGNEKLFAWRKISTLTQPKKVESRRATFFVEHKLIDVEDKEVFLIDPRFDFFVHDGTVFIANKREFETSMNFREGMKAKAAEVIQNFTDSGHFRHVDLIQKYVGDNLHHLRKMASILKAGYYQQPDYIQRLIEVSKEEGWALKVENGQIVVEEDSIELLLKLLNNDRLRSPINNETFDAAAKAPVKKSS

SEQ ID NO: 93692 - protein, 210 aa, Geobacillus kaustophilus HTA426
MLIPFWFRLLFLFMSYFPLFLVLFIKFFNYEFLVYCIKYWRFIDILFLLEIKTLNGVMGLISTLLLVISLLSILFILFELRTTEKKRIGQKKYTIKKIQPRDRDILVYLVTYVLPLISLDMDNFRDIIVLFVLILLIFWLSMYSDLLYVNPVMAALKLRIYAIETDLGEALLISKNDKFEECLGKKIICYRFIRDKETVLIDGSRGQQNE

SEQ ID NO: 93693 - protein, 321 aa, Geobacillus kaustophilus HTA426
MNDELIYVKEKINEMEHNNDYVYQLFIVGSVLREGTQSVYDDCDPKEIPIDQSVQDWLLGTTKALLEDVTENYQVLNIREVDEESETIKRYIEINNLNQLYLWTQRINNEQVENDARTLINRDDFKPKVLLAKLEIDDEMKVYFLKIINESVFLKKRKILEVVDRGDYQISQERDKKLFLDDQWDGIIIGNNVLLYNENKILSLFRYYERFRQAADEIVEQIMEKGIVSDDSNFLQFVQSQISLQKKLAKAADYGLERIKRERIEELINTGMINLQLDEQGRIVCTTKEEARLVIDVILDNFVSSLITDDKYRAINKMRIQ

SEQ ID NO: 93694 - protein, 155 aa, Haemophilus somnus 129PT
MSSVWHIINASMVSIISTIALLYSIIVYIKFQIDLGSSTDLPFTIKKIENSSYENLTFLATYIIPLISFDFDNNRQLIILAILLIVMGIIYIKTDLFYANPSLALLGFKLYKADGNFKNGERNDIILITRERLSLNDKATYIKLDERIYYVKKVG

SEQ ID NO: 93695 - protein, 127 aa, Haemophilus somnus 129PT
MTLDSLKDELKLYKENEIGICVYAILKENLYNPMRLDIESESLNNLTSLFLTEIRDTIINRDDLSLMKLSSSDERKNAIYEYDLDIPKELSTLDFVLGNDNIGLFNLKNHDFGEIKSLIIEIGNNER

SEQ ID NO: 93696 - protein, 199 aa, Burkholderia xenovorans LB400
MNVASIRMSRLVKVGMYLLSLWLLFVLVIVNKAVIDVNICLGCSLLPWSELSKIVKENLLPLVCVAMLAASAVFYMVFVRIISGAKDGPIKVEELEDKNAEHLVFLATYIIPLVGFSLDSPRQMINLGITLLLLGAIYIKTDLFYANPTLSLLGFKIFNIRSQGSAAILISKEELEAGDSVNVVRLDKKIFFARKATRV

SEQ ID NO: 93697 - protein, 305 aa, Burkholderia xenovorans LB400
MKTKQELTDTLNAIFADGVNMKLYFGLGAGAARSYKLADFDDGATQRVLTNYVAGVREFFERDELQTVPLSQLDQRSDALVMYDLQEQPVEFAQLEALQNGPEPDFFSFDENSVSEIRTIAIKIASVQRSVVFFKTFYPVSLVKRDQILLYKLENRFTIFDGDIVKVTPGFDLLLVDGEFYINDFRKFEKAFSFTEIAERAMLAVVQSILEMGIVNDVKGYLAACAAPKRDILRAGQSDVLRLQAATIVAFATQKGDKIGLKIVDGQFHLSSRDSVKKLYKLLNDDYLTSGLTAFEYETLAKNKM

SEQ ID NO: 93698 - protein, 168 aa, Shewanella denitrificans OS217
MRNWLKTILFVSAFSPTLLVLAGVRYYSGIVDALLYQLIVISLIGITLPFLILSWVKGQTESLNFTAKKVESADYYLLVFLGSYASPIIMKIAEIDFGLMLLTVGVIFLVAWVVSNIPSHPVLYLAKFRFYKIESESGMVYTLITRREIRSPKNITVVKQISNSMLME

SEQ ID NO: 93699 - protein, 293 aa, Shewanella denitrificans OS217
MTLSLFALTSDPAKRIVKFNLSNDVQADLTTYLKDQESSFDLQQDEIVFDGKYKPDAGEVLCIENYDDIDNLESAIRNPTSLDLVDPSEDFFHYIKALFSGYILETGGVKVLLQNFDRRKIISTNGLSIFHSANVYKKIEGIGLTIDHKLTATLEEGKLKFFSFHNTRQIFDLSEYYKEATDDDVIEFSNMDLIKSADNSQLLEMSDSWVRRKISLIQQSGILQNVPINEMKAVATEFSIPFITITENGDELIKIPDNKSDLKKLLRFLDEDYYKSPLSKTNFITNSKRVLGN

SEQ ID NO: 93700 - protein, 193 aa, Shewanella sp. MR-7
MQFKILSGFIIFLGSYLPLAIILAVQDIPIAWWGNPLCDLSKIDECMYNPFENPYLSVIFIVVTIISVIISNVTLNEVDLPFDGEVKSSKSIPNDIINYVFPYVVSFMGISYDTPEKMLGFVVFLLWMFAITYKSGQIVMNPLLLMFGWKLYEAKIIINGNERDVRVLKKGSLPPGYYKFQSIQDFYISKEYN

SEQ ID NO: 93701 - protein, 304 aa, Shewanella sp. MR-7
MNSDFNLLKAFDFINATPHLWVFKDSNSPVKFRAFYVQTENGLNQKFKLFVNREIARITEHSPYSYIAQTNENSCLTLDSTITNFSSLKILVDRLETEHRIDDSKDLEGASGYVVKFVLGGVTVYGIKRSNSAWKTSYPKKYINMIFTNGELSGLEDKSFSIEKNFDFYVINNTAFIANKRGFESSMKYREAYENAFVQLQSNPDFSSLFTHLEPIVNYVGTNSIQLRRMAVIESKGIYSRPNFLLNLVRVNAARGWGLNFDSGNNTIIPCENTVGTILQVLLDHRLMSEITNNIYDVPDAVQV

SEQ ID NO: 93702 - protein, 190 aa, Nitrosomonas eutropha C91
MSTTPGKTYSEGLKTARLLMVLSSISPLFILWAIRGNSLIPDHYFIGFCTSMVLLPNAFLWLRIGTAKRNNDRREVTVGTADDHRDHILVYLFAMLLPFYSEDLGTLRDLAATFAALSLIVFLFWHLNLHYMNLMFAVFGYRVFTVYPPADGNPLTGKTRYAVITRRVSLSPNEKLTTYRLSDTVYLEAE

SEQ ID NO: 93703 - protein, 302 aa, Nitrosomonas eutropha C91
MNLAFDLNKVTLIEFGVGRDDGNGQTFVAVPVDAKVQTTLCEMTQATWQAMQQDKDGPTKYEPSDKHGGVEWLYLPLADDMAAGMRDLHQVVNLPMDAAALTSPADIFCYFVRLTDDEQHKLTALRRATQFKGIVKNKGRLIRWFDDTLQIVEDTIFKLDSDFDLLIDEQNVHILRPSGFEFAGQLQQAILNAVPGNVAVIQAELTYIEFDSIKQYAAKHPRAARYLASIRTQKEIKDIDKTSLKKLCKSTGVDVSESNGKVIIAAGYEMAFLQVLDRRRYQLELVKNKPEKFVAASRKPIK

SEQ ID NO: 93704 - protein, 167 aa, Petrotoga mobilis SJ95
MFKSFLFLLSYLPLFVIFAINNFGNVLFLFFSFFSIFVFVVSLVLFISAKTNAEEKFIKFEKVESQNVRLLDYIFVYILPFINMGGIKELISFAIIVFIVGNIYVKTDLIAINPVLSLFGYNIYRVCLMDGREKSIRSAWLISKSITEGMKVKEFSKDFYLGMADKK

SEQ ID NO: 93705 - protein, 333 aa, Petrotoga mobilis SJ95
MNKVNWDEILKNIFLKENLESLRELIATSTDFTMDVFIQNENNQIFWLKNEDPSFFKGIFLTSTDEFLNDLRVKESNKVDEYETVIDDRSFLYLKDVKENVSDIGDIVEIIREGKYIKNYSNKDLETIKKFKLIVKLYSNELNDFLLGIQYLTASKIFKDKRILALTARKIQPLKEQFYLIPKNSFDYMVVGDTVLIRNLTYFERDFGFYKKYEEAKDEVIEEIKKKGNLFGKDIKLKSIDYFSEKIKNKPLYLKRFYKVIKKGNYKKFEFSKVKEIIDDFNLKVKLDEGNKCIDLGEETSIKDFLQLYDELYYRSELSGNRMVASENSPYQE

SEQ ID NO: 93706 - protein, 202 aa, Escherichia coli SMS-3-5
MYMRDDPGKVKEYVRRKVDLYILSLAILFCFFIFITIKLPVCLGAQCKSVGWLLLLKNNIVPLICLGLLLYCWIAYKRFKYDTNKSVELPMEITKIEKINYEHLTFLATYIIPLITFDFEKERYVIVLAVLLIIMGVIYIKTDLFYANPSLALLGFNIYKLNVSITGGVNKSGIILITRRQLKENDMVSYIVLDERVYYSGD

SEQ ID NO: 93707 - protein, 220 aa, Escherichia coli SMS-3-5
MSPQKLDKKGLDDNLSYYINNKNDVSVIVYAILKNSPIAYRMDIEGSAQNGLKELFLDSLKRNIIDNHELGVLSLSSADERNNVIYHYDIEWPDELTSMQNMLGQQGEPVFDFNVQNIEDIRVLLICIGNAQQQIILYKTMAPVNIFSRTGFFLKKSATRLEEIKDDFFRVSDNFQIIKVENNLYVIDLKLIEKMFCFHDVIKKEAMLGTERSPHNFPKA

SEQ ID NO: 93708 - protein, 192 aa, Eubacterium rectale ATCC 33656
MKKQLIILSLSPLFLLTILQYFPFEKFGCVVGNLFNIQMVYKHLPLYIGMWICLIWVIVSLIIFIKFVCFQRYDVVGGYEVKDIKEEKDAGLNFFLTLILPLLVNDISTWNGLLLMIFLVVIIICLLSKTNLYYQNPVLIILKYKVYKFKFVDNEHLPDGEYIALIRGNMDSRNTIEYKKIEDNVLVIRKEG

SEQ ID NO: 93709 - protein, 317 aa, Eubacterium rectale ATCC 33656
MNKQEITSKIKEITETGAVCGVDVYVCLKGEEQGFYIEKMISMNSLKDRIRSIALEIINTQYLQDEVVYCDILDVIDNKKAVYVLEQSDEYKPFALLNDDSMDEVFNFDEKDIGNVLGFLFKINLNSKKLFIYQQAYVGSRLQAKNNLRIIQKDNVFEIVDKEMLKIDKRGELLILDNTILVRNVKVLQDFFGFQVFVRNQAQSVISKLEELDIIGNIATLKEYQTGEKLTISKKLMKVKNSPVLAMDKDELINKIPLVPRYKNIIHIENGKIRTNTKKDVDNLMKLLNDDYVKSELTDMEYDSTSKTLLNSESQDE

SEQ ID NO: 93710 - protein, 174 aa, Methanosphaerula palustris E1-9c
MKFWVNVGLFLSAYLPFFVILAIKNWYNQYVTIVFLIVALYSFVWFLIIWIIEKNTIECYKVVKAENKTKDSLSYLVPYIISFVGFDLTRWQDISALSILLLILFAVYVNSDLLYINPMLSFFKYRVYQVEVSKIAAGCDDSRWDITLLTKRGIKSDDVIRVWDVSDNVFLEVN

SEQ ID NO: 93711 - protein, 317 aa, Methanosphaerula palustris E1-9c
MDEILQCIKNADNNYIKLFFITRKKSQKNKEIKYNVLKAKINSDISEDLKNSGSNQIGSILKKDPEYIDYGILSDFDRVTIEKISTDEVPYLYDILRSMANPNLDLVTDEDLEQVWGYVVRIECFTKTLFLFKKYTPNKLLVKGKKLLRMQDGQFTNLNTQIITIDSSYDAVLLIESSTEISQKIPSSDVFVLSRASFESFFSFVEIYKSEVEANKKYLIEKSLLNNVTLLIENCINDGRKIRKLARIIKNDQLQSITIEKIKKMVQDYNLDIYFDATGKIEFTPEKIWVFLRIFDDDYVKSEITDIKYEVRSKVKK

SEQ ID NO: 93712 - protein, 389 aa, Methylobacterium extorquens AM1
MAKILCVLYPDPTGGYPRVYPRDEIPIISAYDNGQSTPTPKAVDFKPDEFLGCVSGELGLRGLLEGQGQEFIVTSDKDGAGSEAGGARRLPIVHLMDGSGAAETAVRASCASPRFALAGSTYRNITGTNLPRVVSDEHSDTRFRVHGRSRPGRLTSTRFRRHDPVVLQRHGRSRWLPAGVCDRNPVAMQLRILIAAAIYLGSYLPLSLILLAQDLDLEAVKRDICPVGSMVTLSCASPLKNPLWSLAAFAVCLVGMVVTFVALRIVRTPQRVKVSESKHIPADLINYVIPYVVSFISLDFEQGTKLIGFAVFLVWIFWITYRSGQIVLNPVLAAFGWKLFEVKYAYPAGSGIFVGRMLSKLDIEPDRTYLQGHLQDVMVVRGEEGDASR

SEQ ID NO: 93713 - protein, 306 aa, Methylobacterium extorquens AM1
MTTLPDLKAFDLAGSDVTVWVFRTSPGKDGKPRFSGRWVGITEELAGRLKEAVGGALGVITEVIEYDVLEQNNEGSALTIQSDETYVHLIAAEVANETPGRKARNAKDLGNSKFCIIKFVRDDKAMLAVSKTDTSWSTRKTAGVIRAVFSDNELDVEEAPVFTIRPTFDFFVFGERIFIKSKPNFESVLVYKAGHEQAFTTLKQEAKFLALFSDLGPLDEFVGSNKIQLRRAIAIQTKGHYKDETFMARLQAECKNMSLNIAFDDQGRIVPTAETCRDIFQALLNHRLESRLDSKFYDVPSTAPVA

SEQ ID NO: 93714 - protein, 210 aa, Desulfovibrio salexigens DSM 2638
MAKLRNLAPVFIFISSYLPLALILVVKNFDSTKYQSLLSWHELYSLLSSNFWGNFDLLEFSLPVKNPLLVCFIIFTPAVSLLILCWILNEIERCTGVEIKIDQTKTLPTDIANYSVPYIAAFFSLDIGNKLEIISLLIFLTTMFAISYKSGAIFFNPMMIILGYKYMQATYEDNSITVTDNILSKHKIEINEKAYAVNVSGILFITQKDN

SEQ ID NO: 93715 - protein, 304 aa, Desulfovibrio salexigens DSM 2638
MHLETLKDAVENADTHSLWRYKISYSGGRQDRAKPVVMETKGKQSPANFFNQALSESVSSLGEALNYSVECVPGDGQCMFQSTTSKASLRIKSTNIPIAQNSISDLKDLQNTKYYCVKFKIKSGFIHAFKWIGATWSTKNTSYASMFINEGSLKQLEEDHSFRVTKNFDVIVMDNIEYIINFNPYSQIFDYKENLLEVADSAYTELIDLGVLTSSEKIKKYVGNNSMRLKRLSEVVAKGFYAQEKFMKNLKANNKELKFNFKFVGDKIEPEENKISELLTALGDRRLTSMNSGLMYDANSTQQV

SEQ ID NO: 93716 - protein, 193 aa, Methylotenera mobilis JLW8
MTDTRRKIDLYVLSLGLLFVFILIMTVQFPEGAVDLRHLSSWWRFLSANIFPTIIFMCLCYAVFAFFRFDFDLKGATDIPFEVTKVEGINYEHLTFLATYVIPLISFEFSSTRQLAVFALLLLVMGVIYIKTDLFYANPSLALLGFQIYRANGAFKIGNRENIILISKCKIVENQKLSYIKLDDRIYYVRGVV

SEQ ID NO: 93717 - protein, 320 aa, Methylotenera mobilis JLW8
MDIQELKESLSYFYEHQDQIGVTVYAISRLPNQQEPKKLDIEADAQSGLKQLFLKSIKDTIIDVEELAVMNLSTSDERVNVIYAYDIEIPQELSAIDTVIANDNLPTYNLDAEKIGNIKALLIEIGNNEKQVILYKTIAPIHIFSQSSFCLVQHETRLEKIDKDFLRISPGFQMLKIDGELLVNDLAALERSFGFHEIIKKEATLGITAIEDKLVIENVEALRELLEDIKYARRFVKVAKGSPVLIKNIPNTSIISFCKTFPALAGRIRFNQAEDKIVLDSKVSKDLFIKLLMDNFLTSDLTKFHYESVAKDSLDKDVAA

SEQ ID NO: 93718 - protein, 197 aa, Prevotella oris C735
MVQDISKVLFTMTVTAPTFFSLALTGIVKDSKIYYDVWRKFWSDYICPNSFEWWAINGSLLFMLSCIIGVSVYLKYKSRRFKEAKSIVAISYSNMSHRGGEQVLSSVIPWLTVFAEKTDFRILFFCIVLQCCLIAITSYNNSNYNIICSILGYRYYEVHTEENTYILLSKKCIRNKNDIKLYIDITDYMGLIIKNKK

SEQ ID NO: 93719 - protein, 203 aa, Prevotella oris C735
MSEYDIEGDIPKSIFWYENGRYFFQVFSKRNMLSRKTVLKVEYGNSFVRMRENAFIIEDKVNAIYENGRFYFQSYTSANQIFSLIDFVTEATNGEIDSFGRNESLEVDTAQIKNIGNVKTRRLIKILSITGNISTFTRKALGTRKNLLKRYGINARIDEEGKLILPTRTVAELNRTLEFLNEDIFRGAITNSLYRSNSKKKDK

SEQ ID NO: 93720 - protein, 196 aa, Chryseobacterium gleum ATCC 35910
MKKVKLNNIAIFVLFITSYIPLFGLLILRQVKQNIDYLNFGGFSQESVFLALAKFGLSVFLFLTAIFGYIGLKFLLINLDIKKSNGELVKVVEVENKNSESISYISTYIVPFIFQDTNNLFDITSIFIVLIIIFFIYTKSNMIVINPILSITHTLYQIDYNKKSQTKKALLITKDEDLESGQEIKINLITKNIYYG

SEQ ID NO: 93721 - protein, 339 aa, Chryseobacterium gleum ATCC 35910
MDKSILVDIIGQASAENLKMYFVTRILKEGMKANARVLEKFDFKVYQIEITDEVRNYLYELSLKQFKKIQDNEDLNFFDYDVIADETEHLFTYQMQNKVGSFSDVVYNQLNQSPPKITDLNDILQDETLWAYCVEFEIDSNKSFYTFRKISPGKVGVEKEKDGEKKSLGSQIRTFFDTNTNTLSLLKSDTVYLDKQIDCIFYEETFYVLKKFYFEQLVGLQEEYKKRAEDVATSISKHQCFGDIKLLTDKIETKASIHKKLMKLEKLGNLNSLTSKNIKKLETLGKKKKAPINLKDGKIQFETEEDIDNVVKLLCDYFKTGDYSGKPYGTYAGKLQVTE

SEQ ID NO: 93722 - protein, 193 aa, Pseudomonas amygdali pv. aesculi str. 0893_23
MQFRLSAAFLIFIGSYTPLAIILAIQNIPFEWWSRPICELPKLLALTCAINPFRNPSLAILMVAFTVSSAFLASQLFKRIAFPYRIEVVSVKAVPNEIINYTFPYVVSFMGISYSEPEKLTGFLVFLLWMFAITYKSGQIIMNPLLLIFGWNLYEANIQINGVSRVVKILKRGYFPPGNYKAQTIQDFYICKE

SEQ ID NO: 93723 - protein, 141 aa, Pseudomonas amygdali pv. aesculi str. 0893_23
MQVQFDIFRNFNYIDSTVHLWIFKKSTTDRKFNAAYVQTDETVNTLLKNVLIHEVNRTTEFAQYSYLAQTNDNSCLAAPALATNFSLLKVQVDRPEPECAVNSVDDLKGAQGYVVKFTHNGQTLYAVKRSTASWMSTPTKK

SEQ ID NO: 93724 - protein, 171 aa, Enterococcus faecalis TX1342
MLKNILIKLNSISGTIKEEPPYKWIFFGVIIFLSLISFCTIHRFVISKSNRQFNITGKYEKTGDSIISYIFTYLVPLLSMDINNGNSIIVNLLLFIFIGVLYVAQDLIYLNPILALLGFSFYINDEKIIITKFSLEKLKEFEENGYKVKGNRLGSYIYVFREVISKEDSHM

SEQ ID NO: 93725 - protein, 317 aa, Enterococcus faecalis TX1342
MDIGQLYKDVQTVSELDDKNFEGSVEFFLLTEKQKDGVQIFAPDVSNDVQRDLLTFFTKYFQNAQIRNREQIPYDVVMSRPEKKNFFVCETSKYDGVNKFYKKFEEEEHYSSTEGKNVTNFIAYALKIYLTNNEHVCFIGAFTSLSQINKTKFVGNLKDKKLTKVKSDNMFGLSPTMALLMYNNEVVINNIPIFEKCCELSTEFKKNASDVIDTINEYGVIKGIDEFRTTAQDDERIARRLTKMNQDPERVKSFFSNIKSVKKVLKDESFKDRFEGIEFINGKLEYKADKRQQFVTLIADAAYESIVGKQKRIDHSL

SEQ ID NO: 93726 - protein, 207 aa, Enterococcus faecalis DAPTO 516
MKILHKQRKEVKRMRTIQKTLFYMSSFIPLYLLLIVQNFKFRNESGKFSWQTIFDQINFSNKIITLFWIGLIVMIILSLFGCVIFFKIYGAKEGRNGSISDAEFVREDTMGYIVTYIIPLLSMDITSLRSLVVNLLLFIIIGTFYVKNDQIFMNPLYNLFGYNIFSAESGIYITKISKQKLKLFAKRDVKVKKINIMGDIYVLKENE

SEQ ID NO: 93727 - protein, 304 aa, Enterococcus faecalis DAPTO 516
MNIGNLRNFISNVEADDNDSVEMKMIQKIGNGIWSHTPQLTIAMREELKVFYTEILNNNFFDLEQSEYNPNIVIEGSLQVSDLTNAHINEVLAEIDLEENCNDDMGNVDLDKINYYRFKFNYNGNSLYIFRRFTKMKKIRNGILGRFQDNTFRKIETDDFFGIDRDIDILLFDNEALIVNRFALQTIFKLNDYFIERATTALSELEEENVLVNFEDFKNDCLNDKLAARRMTKIINTEGRLEGFLQNTRNLPEVIEHFDLEIELNDNNQIIYNGSKEARSQILFCISDAYYQSLILQRLGEDPS

SEQ ID NO: 93728 - protein, 207 aa, Enterococcus faecalis DAPTO 512; identical to SEQ ID NO: 93726

SEQ ID NO: 93729 - protein, 304 aa, Enterococcus faecalis DAPTO 512; identical to SEQ ID NO: 93727

SEQ ID NO: 93730 - protein, 169 aa, Enterococcus faecalis TX0645
MYKGWDELNKNGTHEIPTKVVLVYFSVLIILIVLGGGTICCFLRKNPDKTEKIQGSFSSTGDNVISYIMTYLSPMLSIELANFSSLIINLSLFILIGVLYVKNNLIYLNPVLLILGFYIYEWEGNGCKRVIITNMTLSELNASSKEGDYVKARKFENDIWLYKKIKSKK

SEQ ID NO: 93731 - protein, 315 aa, Enterococcus faecalis TX0645
MDVNSLYNEIKKVDKELLSRCTKLFLIKQRNMGSGVVLYNLGVEPNVQIELINIFNTFFQNSRTRNKEQLNYDVVMDHTNKNKFLISEKDDYDGIKNFIDLFDDVKPADTIKGIDVEEFIAYSVHVKTPEGLEFIFVGEFSKLSKVSKMKIVGNLKDNKFKKLDTSDTFGFSKNIAMVIYDDEILINHIPLFEKCCQMETEFKKNSAEVLKSIESFNFIDNISDLLDTAEKDTRIARRLTKMNSDPERVKAFFTNKKRVKLVLEDPEFKDKFEGIDYNGETIKYDKKLRQQFVTLISDAAYQSIVGGQKRIDHSL

SEQ ID NO: 93732 - protein, 203 aa, Photobacterium profundum 3TCK
MNRRSKTRLVSSIAIFISGYTPLFLIMIIKDIKDFVWYEKTLETPFFWVSNIKIPYWVTVTNSDVVITLIILSIISLLLLGYVLGNITKDPFDITVISAKCRSSEVVNYTIPYMISFVAFDLSKWQDIFSLALFLSVLCLLSIRSQSVFINPILAAIGYGLYDCSYNEGDQVKECVMLSRNDLLANTKEKFVKLNNYMGIISK

SEQ ID NO: 93733 - protein, 324 aa, Photobacterium profundum 3TCK
MQSKLQTLENIKNVDFGSIASRLWVIKKNSRAGVNNYKALSASIDGLNNDLVGALKKFFCGTQNSVEPIRNLAAYSALTVDTDEDRALVHSIQETDFLTIITKVRQGADNEPVENIQEFNNAWALVVEFTLENHTFYAFSKVKGGWNLKRTSSAKNWIFSDGDFKKVEVDKIFTFRDYFDFIAYGDDVFIRDKANYELGLNIREGLEAKRDVLVDALAEQGIITSVDDLKIAIGTNKTLLRRLVAVEETRYYEDQQFIEEMKEVVDKHGWHSNLTVDDNGKFIIDENNIDLFLKLINDKRFISLIKKQMVDADTVEVVKQEVTE

SEQ ID NO: 93734 - protein, 205 aa, Bacteroides ovatus ATCC 8483
MGQTNQINRLYRIAELVLFITSYTPLFILIVLKQISENVTYLNWGGINRESINLFIEKFGFSFSLITISIFSLIGCRFLFSNFQKNINNGEIVILTDVRNRNSESIGYIATYIIPFIFQCFNTRYEIFAFTFLMIIIYRIYVNSNLLLINPILSFKYSIFEIEYIEQRGKKRNGLIIIEDKYILEDTMINIYPIGYKLFFAKNRE

SEQ ID NO: 93735 - protein, 338 aa, Bacteroides ovatus ATCC 8483
MTLQEILDKVSTTNVNDLRLYFITRVLKDNIKKSAKIIDKYLFKVYQVDIDDEIRQYLYDLSIEQLDKVIKKNYEILDYDVISDDTQHLFTYSMQNKIFSFSDVVCNQLNTTPPKMQSIESILSNKDELWAYCVGFNDSEERDWIYTFRKIQSGKVAIDEKENKSILKTIRTYFDTSNQKLELLKGETVNLDKQIDCIYYDETFYVIKKVNFEQIVGLQEEYKEQSKIVVNELRETGKFNGLEMIEEKIESTPSIHKKLVRIARIGNYRTIDDKIIKKMKTVCNRYGVKLNVKEGKLSIEEEADIDTILKMLADYYKTGEVSGKAYGTFAGKELVNKQ

SEQ ID NO: 93736 - protein, 233 aa, Clostridium bolteae ATCC BAA-613
MEHIYGVRNHVHAKNRRQEETMGEQNLLLKRKLVIQSFLPLFIFIFIRYFDYRMISSICHFIRELMQRNFSVMNRIWDHPYLGPFIAAFISLACSLYGITAMWQFKSMQMSGFVDAGEEIVIEEEITDSGITFFMTFVLPLLLDDVETLRGFIIFTGILGLVIRLMWTTHLYYQNPILTLLGYRIYKFRFLNPVMDGCRDKTMIAVCRTGIAEKKIVKWKYISDDVCLMYNKN

SEQ ID NO: 93737 - protein, 342 aa, Clostridium bolteae ATCC BAA-613
MENKREHSTNHATPKTPKEIIVNSLTELFADDEFGFDMFIMMKTGDPPMKHFAFYEGPTGREHDFKLKVQNSIVKSIRDLFLDEEAEYAMAEQAGGNQNIFYIIKQNDDYKPFELLNTPEKQMGPFFMDDRDKADAILFRFRRGVHSIWAYQYILPATIPNKKNQHFFARILDTEQTDCFVEMPEQLFVITRKVDLLVMDDKIITKDIGLMQRHFGFNDFIKASAKKAVSDISDIRLVTNCEKLTAYIERNQTKYSRKMMRIKHYHVVEKTAEELIQIINTVPRWQGVFDIRDGQIYLRTFRDVENLIDLFDERYTVSLVTGDEFDTDVKRLAAPGGMGGED

SEQ ID NO: 93738 - protein, 196 aa, Alistipes putredinis DSM 17216
MVSFISKFLFTATVTAPTFLSLGLIGVIKDSTNYFQLWDDMLENKIFPTSFEWWGINISFGFMLICLIGIKIFLYRKSNKHKEGKTIQVKSYSNLSLNSAEQIISSIIPWLTIFADKLDFMVLFVCIILQCCFIAIASYNNNNYNLLCSIWGYRYYEVYTEENTYILISGKCIRNKNEIKKFIEVTDYMGLIINEK

SEQ ID NO: 93739 - protein, 283 aa, Alistipes putredinis DSM 17216
MSQFYALMSDNTVKHISLKEEIVTEIKNIFINGGAIFKPEGIEEDVFDGNIISRNGENITYVHYDLPEDFARIPYNQADMSEYNINEDMPKSIFYYDDGKFYFQVFNKRNMLQRKMVLQFECGNIFAKMNNSAFIVEDKIHALYEEGKLYFQSYTVANQIFSLIDFVTEATNAEIESFGEIDGINVNTESIKHIANIKTRRLIKLLSNTDNISAFMRKAPRTKTSLLNKYGVNAQINENKELVLPTNNVADLNRVLEFLNEDIFRGVITDRLYRSNSKKKDNH

SEQ ID NO: 93740 - protein, 223 aa, Clostridiales bacterium 1_7_47FAA
MTHIKGGVIMQAENLNLKRSLILQSFAPLFLLLTIKHLDIDLCWRLLHKFFSVLFSRGAVAFSIALKHNLFGEFVISIMGICWLVLTIIVACGFNGMQKAGFKAAGEKILIEDEQSDNSATFLVTYVLPLLTDDVESFRGLVVFLAMLIMVIMLLISSNTFYQNPVLAAMKYRTFSFKFLNPENDITHPDRVYVGITHGLLVDEETVIKRKYISDGVFVIYND

SEQ ID NO: 93741 - protein, 329 aa, Clostridiales bacterium 1_7_47FAA
MPEETLNEEQIRMKLNDFYDNIAQCGLEAFVVKKNAPKLKRMSLSEACNDQGKNFRTILKEMFVNILNEQYLSLDVEYADGRQVADNQHKNLIFEQGESFRPFSFLNDEAEKGEFVSEDLTEASGLAFQLRKGENTVWLYQHLWSIMVPNKKKTNLMARLMQFENQVVFSEQSESLLTIANKIDILIMGDALITSNVTLLQKYFGFQDYIYQSAQRAVQSIIQKSLVANNEKLMEYISRGKPKYAKKMMRIGTSKVLTLTQDQLIEKINTLTRWQGKFNVNQDTKQITLGTYSEVESLIDLFDERYTRSDVTDTEYDTDVKTVAKPVEG

SEQ ID NO: 93742 - protein, 194 aa, Providencia rustigianii DSM 4541
MENKKILKYLLYVLSLWLLFLSLFIMSYDKSLFLNAFKDWHSLSIFELKAKNFVFIFSFAFMMIGVFIYFYLCFSFMSGWSINCTVDSVSNQSHEHLEFLTTYVMPLVFTDVNSKRTMLNLVIMIIVIGLIYVKTNRFYSNPSLALLGFKIYKGTIRDRGDKEFVIVCHGELKNGSIIKYIKIDDETCIVKIIS

SEQ ID NO: 93743 - protein, 325 aa, Providencia rustigianii DSM 4541
MFTQIDSILQSQNLSSEAFFLVDSGSGGFDLRRVTLEPAAEASLTTSFKKTLEDKVIKPNSGASSVPLVSTLVDRGNKVFEYDHQTLNHLPVEFTKISDVLNQGVLSNTPKFDFSTQKLSDVKGFIYHLCDGAGNSIVVYQHKYQVTMHRKTKASYFSLNGRTLDKIDYDSIDINGNIDFFYFNSTYYCIDIKVLERNYGLEQVINNMASQAIPSILNLNLFDCSNIQNPQDIFKDMYHDRSFMRRLSQIRSSTLVSNGSITIQMVDAVRQKFPVFQRNLNVTNGFIDMTTKEHKRYFIRLLNNEASFAALNQEPFLAVDKDSAA

SEQ ID NO: 93744 - protein, 183 aa, Corynebacterium pseudogenitalium ATCC 33035
MTVARYQESPKTRLFLFVSSFAPVFIIAGLRLFAAQRMLAVLLLVGGVVTFLLTPLVLFTRRKAGKQEFVVSNVKDESSQIPTYLITFIFPFLFLSEQMSASLVAAYVGFAALMVALLYRTSLILINPSMLIVGYRVFSVDIVGQGGAYIISKESPLPSQSTYTRRIADGLFIAVEEPTGQTS

SEQ ID NO: 93745 - protein, 315 aa, Corynebacterium pseudogenitalium ATCC 33035
MDKSTADELLDFVDLTKPVRLILGYRSNDDKVSLRRVALAQDAQDMFAEIASEVLENRKQRDPEDWEPARPVSKETYLVTTCEAVGEVPQVSKSKVQPLLAALIDTQDIVETEGKTLLKADPYFYAFQFGIGSDSVTFLRKLNPLRGLRKKRLGFLDDELSLAHHTVFAFDSCVDLIITKEHLIVFNQTAFASIFRGQKELKKMAKGWINGIRDSTPMTQESYDVLLAKGVRDSRAAKRIESIARRGHLASLDASDLREGMEECDLNPSVYMNQSGELVLTADTLFDILKFLNEDMFRGVLTDAPYEVDSKARRN

SEQ ID NO: 93746 - protein, 194 aa, Enterococcus faecalis Merz96
MRTIQKTLFYMSSFIPLYLLLIVQNFKFRNESGKFSWQTIFDQINFSNKIITLFWIGLIVMIILSLFGCVIFFKIYGAKEGRNGSISDAEFVREDTMGYIVTYIIPLLSMDITSLRSLVVNLLLFIIIGTFYVKNDQIFMNPLYNLFGYNIFSAESGIYITKISKQKLKLFAKRDVKVKKINIMGDIYVLKENE

SEQ ID NO: 93747 - protein, 307 aa, Enterococcus faecalis Merz96
MLQMNIGNLRNFISNVEADDNDSVEMKMIQKIGNGIWSHTPQLTIAMREELKVFYTEILNNNFFDLEQSEYNPNIVIEGSLQVSDLTNAHINEVLAEIDLEENCNDDMGNVDLDKINYYRFKFNYNGNSLYIFRRFTKMKKIRNGILGRFQDNTFRKIETDDFFGIDRDIDILLFDNEALIVNRFALQTIFKLNDYFIERATTALSELEEENVLVNFEDFKNDCLNDKLAARRMTKIINTEGRLEGFLQNTRNLPEVIEHFDLEIELNDNNQIIYNGSKEARSQILFCISDAYYQSLILQRLGEDPS

SEQ ID NO: 93748 - protein, 197 aa, Citrobacter sp. 30_2
MDSRPYLKTVLYILSLWLLFLSLLIMSYDKVLIKNVWDYIFTENFTLSISSLKVRNIVFIVSLIFIFIGAIILIVLANSFGSGWSVACTVSDISNENHEHLEFLTTYIMPLVFTDVDSKRTVLNLGLMIFVIGAIYVKTNRFYSNPSLAILGFRIYKANVHDRGVKKCTVICRSVLKSTDNIKYIKIDNETYLAKIV

SEQ ID NO: 93749 - protein, 323 aa, Citrobacter sp. 30_2
MFTNIENISKSKRISGEAFFVADVQGTIDIFKVNLEPNAEKDLTTSFSKSLINNIIEPNRGKVAVPLVSTLLERDKQVFEYDHLAINHLPIEFTKMNNVLNFGVNGNATQFDFATQSLTSVKAVIYHLCDGNGNSVVIYQHKYPVSLHKKTKKSFLSLNGRTLDKITHDSIDINDTIDFFFFQNKYYALNIKLLERMYGLESVIDNLANNSTPLIINLGIVNTQGMPVPLDIFKDMYKDRAFMRRLAMVSKGNLVKTGVSVPQIQQVMQKFPVFQRNIDLTGGLINLNTKDQKRYFIRLLNNEASFAALDNSPFLAVEKDSAA

SEQ ID NO: 93750 - protein, 178 aa, Escherichia coli D9
MLFVFIIILTAKIPFCFTSDCSFIGLKKLVLTNIVPIVCFIFFLFSIYFYKRLKNITKYNGQDSVKITSCQSENYESLTFLATYIVPFMGFSFEDMQKNIAYLLLVVVIGIIFIKTDKYYANPTLALFGFKLYRVNILHPGSGETKNLIAISNDVLKVDDNVYYSFFDEFVFIARKKV

SEQ ID NO: 93751 - protein, 187 aa, Escherichia coli D9
MALYKNKTNLAVLRNSRKMFNLVPDPDGYLKQLPNEILRLDFNYDLFSIDEDFYIKNHKTLETQMKFHQVIEAQAVIALNSLRNSLLIEDISGLEKSSREISFARKLAKISKHSPVLGKIDTKTIIDYVSQHKYLSTILQINEAGDKLLIKTKTSQKHFIKLMSDDYLQSDLTKIIYMSIAKDRLDE

SEQ ID NO: 93752 - protein, 193 aa, Lactobacillus salivarius DSM 20555 = ATCC 11741
MKNDYISKWFLFITSYLPLYIWLLLSNINYVELLKLNKKDLEISTKKLFYFVLVVFIIISIVELIQLFKSSGSEIKKIPKEMEATPESDGLMNYIVTYITPLVSFDLSDIKSVIMNIALFLLIGLMYVGSSATYLNPVLGIFGFKIFEVSGFPQVHHIISKFSYDYLETIKNRGDEVISYHLGDGICIIKSKK

SEQ ID NO: 93753 - protein, 320 aa, Lactobacillus salivarius DSM 20555 = ATCC 11741
MKDFRLDEYINDINAVYETEEFIKRTEIFLIKLDKKVSEIYKQDSGDDSKKLLLDALIEKLNESRFKKREVVYYDAVTNKKNTHELVKVDDYPNINEKLKEFNNSLSSTKGLKEDKFRLYAMTLKTNKHNYKIIGSFTNTFALKKKFLIGNFSDSKIKLNQRNDIIGFNKKIELFVIDDKYILINQAESKFESLFKMNILFSNQATQILRENDRIKEIFDIETCDKLSKKVELGKRMATRLIKIVSDTDRFNKTIDNIDKIKDIIDNNNHKFHEKVKDVNYRNGKLSVPDGKEVQLLDAISDAFYQAVISETENVDETRM

SEQ ID NO: 93754 - protein, 189 aa, Acinetobacter junii SH205
MRQNMSTQQNESLGFIRVMMVLSSFSPLFILWALRGNKEVSDLYLIPICAFFVIIPNIFLWRRITVAKKQNDKRTIKVGTADDHKDHILVYLFATLLPFYSVGIESLRDVGTTLVALVFVIFLFLHLNLHYMNILFALQGYRIFTICPPEDNNSISGKTPQVLITKRAIVLNGDEIVAYRLSNTVFLEI

SEQ ID NO: 93755 - protein, 301 aa, Acinetobacter junii SH205
MVVDFDFDNIENIEFGVGRESEDQNQQFFEAVPVDVSVQKALVEMAKATVRIMNKSSPSPSLYQPSEKHAGIEYLYLPISDQMAQTMKELHEATNLAMNSKVLKNPTEVFCYFARFTDKSGKKLTALRRAIQFKGILKNKLISLCDDTLKIVEEKVFKLDADFDFLIDNSNIHIIRPSAFEFAGKLQEAILLAVPTNISSIAADLGYVDFTSIQAYAEKRPRAARYIASIKSQAETKNIDKDRLKLLCENTGVSLNIQNGKIFVNEGHELGFLEVLDRRRYRLELIDGQAENFKASSRSKL

SEQ ID NO: 93756 - protein, 185 aa, Prevotella sp. oral taxon 299 str. F0039
MSLGLLFGFLLIKAIKIPICFDDDAKFIGCYNLIKMNIPTLVCFFCLIAEYFCVKRFLHSLGGSKDLPCTIKKIKNGNFEYLTFLTTYIIPLVCFDLGKPNECILLVVLLILLGVIFIRTNLYYTNPALCILGFNLYEADIEYKSKILSNLKILSKIKLKENDKFKKFDLEFNEVIYCKELNAHE

SEQ ID NO: 93757 - protein, 316 aa, Prevotella sp. oral taxon 299 str. F0039
MNKEELKEIVQLSINENAGIEIFLGLKNGEIRKANFIDEVQKEIKKVFIDDIEKRIIESEYPIMCLSSSDERKDIIYHFDYTSLPDDLKFFDTVLDPMIDIKTFSFVDDKLSNIDFFLFLIGDETNQILLYKQLASINIYKKNTGIFVRKADNEFARVNDDFLRIVPGFEMFKINEELYILDLKFLERKFKIYDVIRSAAVKEIEKINEYGIVQNAESLNNLLKDTSFARKLSKISEHSPVLGKVSNNAIISFTKNYPSLKNTFKYTDDDSQIILTTQKSMMTFIKLLNDDFLSSELTRNYYDSIAKDVLKEDTIS

SEQ ID NO: 93758 - protein, 171 aa, Klebsiella sp. 1_1_55
MLNKLAKYLLTASSVAPVFFTLAFLSYISKHYKFMIAYLSLGVTILLLCVLIVKYAINHNSVTNKKLTNASPADKEITNYFLTYLFPLISGPEAFMDVRIASFFALSLFFYISFSGSYSFNPLLSFWGYKYYEAEDDTGVSFVVLSKKPLLKASNNRINLIKLTDYTYIAI

SEQ ID NO: 93759 - protein, 297 aa, Klebsiella sp. 1_1_55
MELFAITDNTVGTRIVKIVTDRPTQNVITQLFNEQKTFFEDRYTEGVEFSGGYITSGDEFFVIPDFDDVIAVLDAINNPTAIPEWEPEDISVFNIIALFSGYPEENEKPAIALIQSFDKRQVIDNRRTIFHKPFQAGNTFCQSAEHGIVIDNKLTAILTGTELKFKSFHMLRRIFDVDAYFREATNEELTTFSSHEKFSVAQGFDLTTIADSVIRKKVSLINKSRILEDYSVTELRISAAEIGVVLDTENAGEFEKIKMPQIRKDVKRLLHFLDEDYFTSHITRTLYRANSKRREDV

SEQ ID NO: 93760 - protein, 100 aa, Aggregatibacter actinomycetemcomitans D7S-1
MLSFMRIDLSEWQTITAIILFLSVLFIMAYRTQTVFINPILAISGYMLIDCTFKRQEKEIQAMVITREPISAGDSVCLDRLSHYLYIRSQSDYQNKEESV

SEQ ID NO: 93761 - protein, 313 aa, Aggregatibacter actinomycetemcomitans D7S-1
MKAQIKKIMKEIKEEDFNSWKASFWLIKRKKHPKDKSNSYSAMRVDIDDKLPRRFRGYLKKQRQDKKYHLESYDYSNADCDDVLLTIESEITDFSKIEIEIGKGFDNARATSYSDLLNSWAYVVLFEEDNKKLYAWKKISADTQPKKVASKNTIFFHNHKLVDLEDKEVFVIYPNYDFFIYQSITFISSKRQFESSMNFREGMKEKSDQVLSDFQNLSVFKNIELIKEHVGENLHRLRKMASILKSGYYKQTDYIEKLISVSKEENWELKVEEGKIVVEEETIDLLLKLLNNDRLRSPINNETFDASAKSRVD

SEQ ID NO: 93762 - protein, 207 aa, Enterococcus faecalis S613; identical to SEQ ID NO: 93726

SEQ ID NO: 93763 - protein, 304 aa, Enterococcus faecalis S613; identical to SEQ ID NO: 93727

SEQ ID NO: 93764 - protein, 207 aa, Enterococcus faecalis R712; identical to SEQ ID NO: 93726

SEQ ID NO: 93765 - protein, 304 aa, Enterococcus faecalis R712; identical to SEQ ID NO: 93727

SEQ ID NO: 93766 - protein, 228 aa, Edwardsiella tarda ATCC 23685
MVYNKKLDKVMGILECHALILEIYMRVNKLRLGARFSLFIVSYLPLFFIMCFIQLYTHKDYLHWGGVSLDSITVFVKYFGAVSILILFSLFGIIGLAIFLKNIKRRCKISGRRVQIIDIENKNNESISYLFTYVIPFVFQDLSTLSNVIPIGILLMVTFLIYINSSMILINPTISMSYTLYQVSYQDVECGKKRSGMILTKSKYLEEGDFIDIEDVGPKLFYAELLEE

SEQ ID NO: 93767 - protein, 341 aa, Edwardsiella tarda ATCC 23685
MKMLNLEDLLEYAENLKDDDDVKISLYFVTRHLKVGVSKAAKVTDKYDFYIIKAPIAQDVANFFKQTLSNQIISHASKDDVEMKKYTVIDDDIDNKIYAYAMNNAISFSKVISEDIKSDKIRTITSLTEISDNLWAYCIKVQKNLELTYSFRKISKGKITTSDPQSLRQRICAQFDKSDKELRVFDGNAINFDDKIDCIYINGQFYVFHKKSFESIVGLDDEFIESSQKTLNIIKGFNLVEGLDIIEQAILYKPSFRKTLAHIAEKGNHASLSKKEVTSMNDVLRMFSNEQFTIKNEKIVIENEKQARNFLRLLNDYYKQGMTTKKYYGTESGSLVSPINK

SEQ ID NO: 93768 - protein, 204 aa, Escherichia coli MS 84-1
MRVNKLHLGARVSLFIVSYLPLFFIMCFVQLYTYRSYLNWKGISVESLTIFFKYFGAVSVIGVLSLFGIVGLTIFLKNIKRRCATSGRTVRVIDIENKNNESISYLFTYIIPFVFQDLSTLTNVIPIAILLTVTALIYINSSMILINPTISINYTLYQVTYLDLESDKKRTGMVLTKSKYLEEDDLLDVEDVGPKLFYAESHKE

SEQ ID NO: 93769 - protein, 342 aa, Escherichia coli MS 84-1
MKMLKLEELLEYAEQLKDDDAAKISLYFITRHLKAGMSRTARVVDKFDFKIIKAPIAPDIAKFFKYTLSNQIISHASKDDIVMKKYTVIDDDIDNKIYAYAMNNAISFSKVINNDIKNDKPVVLTSLAEVQNDLWAYCIKVQKGADVTYSFRKISRGKVTTNEPQNMTQRVFALFDKTDKELRSFDGSAVNFDDKIDCIYIKDQFYVFHKKSFEAIVGLEVEFTEAAQKTLNTIKELDLIEGLDVIEQAILHKPSLRKILTHIAEKGNHTALEKNDVQAMNDVLKMFQNEEFKTNEHGKLVIEDERQGRNFLKLLNDYYKQGMTTKKYYGTDSGNVINPIKA

SEQ ID NO: 93770 - protein, 190 aa, Escherichia coli MS 115-1
MTTDFMYTGFLYSYGGWCMLNGFARYALTASSVAPVCLTLAFLAYINDNYKILVSSILLAVVSVVFCVFIIKQAQKYNPVTLKNLESASPADKEITNYFLTYLFPLISGPTTFMDWRLALFFYLSLFFYIKHSSSYSFNPILSIIFGFKFYEAEDDTGVSFVLLSTKPLTNAKIKGLRVKKLTEHTYMIV

SEQ ID NO: 93771 - protein, 297 aa, Escherichia coli MS 115-1
MELFAITDSEIPTRIIKIDIDAPAQTVVENLFRTQRSEFINEDIEEIDFCASYNVQDGEIFSINPFDDEIGIINAIERPDAVPVWDPDDVSVHYFKALFTGEPASNGNPTQVWLQCFDRRQIINNEKSFFQVVTQPGNRFSVSTRPGFSLSDRLTAILVGDKLLFKSFFMLRRFFNMEEYFNEATREDLDNFIGNDIFHVENAEDFMTFADSAIKKKVSLIISSGILNDQPIENLIECAQKIGYQLGITNVNGDNKITMPNSKREVKQLLYFLDQGYFNSIITNELMLTNSKRPIRI

SEQ ID NO: 93772 - protein, 212 aa, Yersinia intermedia ATCC 29909
MMTSTNSNSASFDNIKFKYYLYFLSLWVLFLSVSIMSFDWVFFERLMKFLSLQYTPDYIVNNAYKLKIRNFVFIFCISMVLFGITSVFYLFSSLSRGWGSTRKVINVKNQTHEHLEFLTTYVMPLVFTDVNSKRTVINLLLMICFIGVIYVRTNRFYANPSLAILGFRLYKCSIKSDSSCKEYTIICRGKLSNGSQVKIKKIDDDTLIAKLI

SEQ ID NO: 93773 - protein, 335 aa, Yersinia intermedia ATCC 29909
MKAELEEFLQNDGLSGEMFFIIKNDNNYIYRRVVLHDENTEPLITESFKLSIANEILKRITVDDNGGEIIDNITDMNYENKGVYYFDISDDDRGEVIKTIEEISSLTLADNPVDFKFNDASLDDIVGLVYHISDGDKNIYLYQHRYPNFLHKKSRLSFLGKDDVLVPIPYDMINISKIIDFFIFDGVSYAINIKLLEERYGLTQVIDNMVNEVTPKIIELEIVNKSVLTEPEQLFDDMKEDRGFMRKLARVLKNGILELNVDINIVNEIKDSFPTIGKNIEVVNDKNGIQYIKLTSKSRKKAFIRLLNDEAVRSVLTRKPSIAQNHKPEKDVAPA

SEQ ID NO: 93774 - protein, 199 aa, Lactobacillus reuteri 100-23
MIKIILFLISYIPLYFVLFCNNLLNYYSKTNKKLNIQNRILNSIGVFEQKDTFVFYLIIGLIVVPIVLFFIFLFYKVKTGKSSPVYPENYKKTGDTIINYLITYIIPFFSMDITTPSVYFWGNIILIFVVMVLFIRLDAVYLNPPLILLGFYIFTDEDENKYYLTRNSLTKLKMAKKAKDYLEIIRITSNFYYIKKYKI

SEQ ID NO: 93775 - protein, 328 aa, Lactobacillus reuteri 100-23
MDTINAVKDSFKKAEEIIEDDATDITLFLLWKKNSKSDMQFSKAEIGNEEKESFIKRFKEDYSSSDEYSPYSVIMEKTDRKIYINKDFFPLMNSYISALNLDVPDSDKKYNGDLDGVVDHLDYVKGYCADFVNTDTKKHVYLFGGVAGFNSMQKKKALGMIGNVTVSGITKLSDNNKILGFRPHTICYIYEDTCVIQSKQGFENLFGLIEEYKKSALEVVKTMEEDSDFFQGFSQMKNDLEKKPIYYRSLVKFSKYPERLQKLSDHLSDIEDVVKENGNFSNDYDKVVLNDKGIVYSTDALEQILSLLNEKPVSSLITGEEFLADRDE

SEQ ID NO: 93776 - protein, 205 aa, Vibrio cholerae MZO-3
MNTLQKIKLYILSLALLFVIIAIITAKLPKESFEWCKPEEACNTKAILSNLFNYFFLLLKANVIPLVMLLLLAISWCFKYEFDHLLQGGGQKIIRIQSIENEDYEHLTFLATYIIPFFGFKFNDPNQFTAIIVLLVIIGAIFVRTNKYYANPTLAVLGYRLYKATLNDKNGVYESIVVISKDQLKENEIVHWEKISDNVFYIKRK

SEQ ID NO: 93777 - protein, 234 aa, Vibrio cholerae MZO-3
MSKFKTWLEDFINGCDGIAVYFVDDANKIHDSDIDSKVLAKFRTAFCQDLRKKYTDSDDFEVEKLSTFEERPHTLYAYDFSPREMPLEFKLTKNVLDIKPTDTIPKYQVKANKLSGIRGAIVLLTKGISESIAFYQHIFPVSLLGPDKGVLNLTTHATRLIELESDVLKLNTKFVFMQCTHGYFVENVGVLETNLHFKKAINTRAKKYAGEILSMGLVEEALLRNSFSKPSSPT

SEQ ID NO: 93778 - protein, 193 aa, Shewanella putrefaciens 200
MQFRLIPALLVFLGSYFPLALILLVQDVSESSWSSNFCTEWESCRLPTFDHPWLAFSAVAVTGLCLLLTCMIFRIIRYRYQVNVVESKSIPSELISYSFPYIVSFMGVDYGALGKVVGLMFFLLWLFLITFRSGQIILNPILLILGWNLYEAKVCVNGHIRITRVLSKSKLTPGDYRCEVIQDNYITKGNDLE

SEQ ID NO: 93779 - protein, 303 aa, Shewanella putrefaciens 200
MTDFTDWREFDYQQAAVQLWVFKKSTTDKRFKAWHVRTDVRIETLFRDAIVDIVSKTTEKLDYSPISQNNESSCLVHALESSEGLLALLAAVDLPEADNIDAELKHLKGAAGYLVKFQHDDNTVYAVRKTAPTWKPKVRNTVINAIFHNGELSVTPEETFSFDSFFDFFCINETVFVKSKRAYESTMSEKSAYKKNFDDLVVEPTFNSIFSDIEPLKAYVGTNSMQLRRITVIQSKALYLRPNFPQKLQEINGKRNFGLNFDDNGKLIVCKDTAKTVLQVLLDHRLLSEITDTIYDVPDAEVV

SEQ ID NO: 93780 - protein, 173 aa, Lentisphaera araneosa HTCC2155
MNTFAKLLLIATSLSPLLGAVAINKWATKQAYWQWLVIALLLILICWGLLTYLRTKGPGINTFTIKEFESKDKEMLAFLLTYLLPFISSDKLSFTGEWFTGAYIIGVIFFTLAHANAFHFNPVMGFLGFHFYSVKSDDGLSYLLITKNEVRTPNSNIDTVEIAHNIRIEVEGK

SEQ ID NO: 93781 - protein, 296 aa, Lentisphaera araneosa HTCC2155
MLRNLQLTTYIKRNNEESLLRIPIHRDLQESLEVLWTEQYLAFTSETQEVVFSAGYTPNDDERFVINDFELLEHLNISREHTRNLTSIASCADQLNSVKAIIAFAQDEEGNELMLFQKFMKSHIIQPGRSLFLASDTYTSSNKPGLTLGNKLDAVVFKDELKLLFQNFRTTNVFLPLGDFYREVTETQIIEILQHDNISIDRPEALAHKASQWFKTRFSMLKDSGVLDSYTPSQIRGDASGYEVEIEIDTSAGHEQIIFPTDKTKAKKLLQFLNEEIYKGAITQKLYETNSKRDAE

SEQ ID NO: 93782 - protein, 65 aa, Salmonella enterica subsp. enterica serovar Hadar str. RI_05P066
MIYVKTNRFYSNPSLALLGFRIFKANINDRGTKEFVIICHGEIDNNSRIKYIKLDNNTCLAKITQ

SEQ ID NO: 93783 - protein, 325 aa, Salmonella enterica subsp. enterica serovar Hadar str. RI_05P066
MFTAIDNILNSTQLSGEAYFVAEHQGQLDIFRVALEPGAEQKLTQSFSRSLKRDVVDPNTGQNTLPLVSSLLSRDKQVHEYDHQVINYLPPALAKMADVLSFGVNNTPTDFDFAQQNLSTVKGIVYYLCDGQGNGVVVYQHKYPIALHKKTKLSYFSANGRTLDEVTHDSIDINGNVDFFYFDNKYYALNINLLERAYGLEQVINNLAANATPHIIALNILDVSNHPNPADIFNDMHRNRNFMRRLATTANSPLLQNGTINIANIQTLIQNFPILGRNIIINQAGLIELSSKKQKLYFIRLLNNEASFTALNLEPFLAVGKDSAA

SEQ ID NO: 93784 - protein, 122 aa, Alteromonas macleodii ATCC 27126
MDASIREKNLERFNFSVATVEAADRENMGFLLLYLLPLFTSSFTSLNWTIWVPTLLIFAVITSTGYSYHFNPLLGIMKWHFYKVGTPEGVTYVLITKKELRHASQPLIVSQLTEYIVIDVED

SEQ ID NO: 93785 - protein, 295 aa, Alteromonas macleodii ATCC 27126
MTAQQNFFALIKDDGGSCQIKRLRVNQSLQNELIEIFNTQRIRFEQGIDTEIAFNGDWKPDSNEIMTLDNLDESELMVNAINANASSFPDLDISNFSDEPIKALFSGFTENSQTTVLVQKFTSRQALSLAELPIIKMQTGNTFVKTTDTLFTIDNKLVAIIEADKTKFKSFHNARMVFELTDYYKEATDEDLNDLSLHTSLEITNLENFKGIADSQIRKMAHSIISSQVLDTYSVSDITTAASSFPDIRVSVNNGKIVLPEDKKELKEVMHFLLEDIYRGPLSGNEFLTNSKREL

SEQ ID NO: 93786 - protein, 201 aa, Enterococcus faecium E1071
MRTIQKFLFYMSSFMPLYLLLCVQNIKVFDKNKKFSSDIFCSQFNFSNIPQSIFWWGLIVFVFISLFGCILFFFIYTKKDGIISKLEDAEFVREDTMGYIVTYIVPLITMDIYSPRSLIVNFVLFIVIGTFYVKNDQIFMNPVYNLFSYNVFSTEKGIYITKISKQKLRSISKHGLEVRKVNILADIYVLKEADNKPISQF

SEQ ID NO: 93787 - protein, 302 aa, Enterococcus faecium E1071
MNIDEIRRFMRDLDTANTDSITMKVVQKVGNGIDIYTPEIIVGMRENLKNFFCESLDNKFFDLEQRVYDPSVVVEGTLQISDLATAHINDVLADLRNSDNYVGDVKDIDIERVNYYVFEFSNNGRNLLIFRRFTKMKKIRNGLLGHFVDNTFRKIETDDFFGIDRDIDIMIFDNQALIVNRFALQTIFKLNDYFNQQAQIALKKISDVHVISNFDEFCEDCLNDKLAARRMTKILNTPGRLSGFFNHLEHLPKVIEHFDLDIIFENNQITYNLNRDSRNHILGCISDGYYQSLIQQRYGEEL

SEQ ID NO: 93788 - protein, 195 aa, Escherichia coli H736
MKRKSTFNKMGLYILSLMLLFVFIIILSAKIPFCYGSSCHFIGFYQLASSNIISIICLIFIGIAFYFYRRFKGLTKVNNADCVTITACQSESYESLTFLATYIVPFMGFSFDDPQKNIAYFLLIVVIGLIFIKTDKYYANPTLALFGYKLYRVNISHAGSGEVKNVIAISMDVLTVDDQVFYSFFDDYVFIARKK

SEQ ID NO: 93789 - protein, 319 aa, Escherichia coli H736
MTPVNFKNQITEIFDNFSGIRIIFIVKTEDNYELKLSKIDAEALPKIVEGFKIRLYDDIVTNEDLTIPLLSNFDDRKNALFAFDYEEHPKEFDFIKNAIAIPPNSQDYYDLNNKFTDVKGIIIQLRGNNKCLSLYKNKTNLMVFEQSRKLFNLIPDADGYLKELPTQVFRLDYNYDLALIDDEFLIKNQKTLEITMQFHQVIEAQATVALEALKASLLIEDLTHLEKSAKEISFSRKLAKIAKHSPVLGKIDVPEIIDYVSKHTYLSTVLIVSEDGTQLLVKTKESQKHFIKLLSDDYLESPLTKILYDSLAKDELKAH

SEQ ID NO: 93790 - protein, 172 aa, Escherichia coli TA143
MNKLARLLLTASSIAPVCATLFFIGYVKDTVWLMQYSLCVGIASWLLAIGLIQYAEKQLEPLTKNISSVSPANKEVTNYFLSYLFPLLGTDSIAENKAYALFFYLSLLFYISFSENYNFNPVLSLIGYKFYEAEDDTGVGFVLISKSVITDIKDIKFTVIQLTDYTFLHVKG

SEQ ID NO: 93791 - protein, 294 aa, Escherichia coli TA143
MALFAVIDNTIATRIVRVELDATASTSVTAIFQQQRQYFESHHNNMIPFYAGYTPKHSECFEIQNFTDSARLIDAVNRPTAVPIWDPSQIDIGYIKALFVGVDAPANPNIIALQTFNKKQILDTSKSFFGKLFASKTTFSKANSIGFNVDDKLVAIIINDTIRFKSFFNLRSIFDMSSYFSAATDQELNAFSQLSVFSTPQGFDLKSVADTVIRNKVTLINQTGMLTPQNMSKFKSEAAKVNFPLQTIIVGGVEKIVMPSSKKEIKALLDFLEEDIWVSGISGRRFKSNSKRPI

SEQ ID NO: 93792 - protein, 204 aa, Escherichia coli MS 85-1; identical to SEQ ID NO: 93768

SEQ ID NO: 93793 - protein, 342 aa, Escherichia coli MS 85-1; identical to SEQ ID NO: 93769

SEQ ID NO: 93794 - protein, 204 aa, Escherichia coli MS 124-1; identical to SEQ ID NO: 93768

SEQ ID NO: 93795 - protein, 342 aa, Escherichia coli MS 124-1; identical to SEQ ID NO: 93769

SEQ ID NO: 93796 - protein, 162 aa, Prevotella salivae DSM 15606
NVWRNFFSDKTYLNSFEWLAINGSLLFMLFCIIGVSLYLKHKGKRPKEGKTITVTSYTNMSQNGVEQVLSSVIPWLTVFADNLDFKILFFSIVLQGCLIAITSYNNSNYNIICSILGYRYYEVHTKENTYILLSKKCIRNRKEIKSYTDITDYMGLIIKDKE

SEQ ID NO: 93797 - protein, 262 aa, Prevotella salivae DSM 15606
MSQFYALMSDNTVKYISLNEDVVNDIRNIFISGAARLKTAEMEEDEFNGDIMARKGENITYVNFFLPDDFSRIPDNQADMSEYNIEEDIPKSIFWYEEGRYLFQVFNKRNILKRKTVLKVEYGNSFAKMQEKAFVIEEKVNAIYEDGKFYFQSYTSANQIFPLLDFVTEATNGEIDSFGENENLEANAVRIKDIANVKTRRLIKVLSSTTNVSTFIGKSLRTKKSLLKKYGIKAQINNEGKLILPTHNVSELNRTLEFLNED

SEQ ID NO: 93798 - protein, 194 aa, Xanthomonas perforans 91-118
MQFQFWSALFIFLGSYFPLALILMVQDISAKYWGAPLCGWRGQWNCQFQVFGHPWLASGSVGVTLGALLLMVVVLRSVRLTHRVHVQEVKAIPNDLINYVLPYVVSFMGLSYGDPQKLGGFLVFWIGLFVITYRSGQILMNPLLIVMGWKLYEAKVALGQVGAVRIVRVLKKGALLPSIQIAEEIQDVYLMGDP

SEQ ID NO: 93799 - protein, 309 aa, Xanthomonas perforans 91-118
MTDQALRELQGFDLDTARVHLWVFKSSTTVSRFTANYVRIDEALEGRLREFAKTQRAKMTEWIPYGHLAQPTDNGCLSVSAADTDFALLQALVDRPELEHPAKKRDQLKNAAGYVVKFYQEERVLYAVRRSPATWKTAYRKKGVINMAFQNGALSAVQEVDFTLEPGFDLFALDDSLLVGNKRAFESMMKYRAGFVDAFVELQEEKKFISLFTDMAPLVAHVGLNGTHLRRMAVIQERRLYENPKYLGTLREVCERHNWGIQFDAEGLIIPTEETARVIMTLLLDQRLISEITAIMYDVPGGHRVDAAQ

SEQ ID NO: 93800 - protein, 211 aa, Yersinia enterocolitica subsp. palearctica 105.5R(r)
MTSTNSNSASFDNIKFKYYLYFLSLWVLFLSVSIMSFDWVFFERLMKFISLQYTPDYIVNNAYKLKIRNFVFIFCISMVLFGITSVFYLFSSLSRGWGSTRKVINVKNQTHEHLEFLTTYVMPLVFTDVNSKRTVINLLLMICFIGVIYVRTNRFYANPSLAILGFRLYKCSIKSDPSCKEYTIICRGKLSNGSQVKIKKIDDDTLIAKLI

SEQ ID NO: 93801 - protein, 335 aa, Yersinia enterocolitica subsp. palearctica 105.5R(r)
MKAELEEFVQSDGLSGEMFFIIKNDNNYIYRRVVLHDENTEPLITENFKLSIANEILKRITVDDNGGEIIDNITDMNYESKGVYYFDISHDDKGEIIKTIEEISSLTLADNPVDFKFNDASLDDIVGLVYHISDGDKNIYLYQHKYPNFLHKRSRLSFLGKDDVLVPIPYDMINISKVIDFFIFDGVSYAINIKLLEERYGLTQVIDNMVNEVTPKIIELEIVNKSVLAEPEQLFDDMKEDRGFMRKLARVLKNGILELNVDINIVNEIKDSFPTIGKNIEVVNDENGIQYIKLTSKSRKKAFIRLLNDEAVRSVLTRKPSIAQNHKPEKDVAPA

SEQ ID NO: 93802 - protein, 191 aa, Streptococcus sanguinis SK160
MQRDLFSKWTLFITSYLPLYLWLLFSNINYSKFSFERLIALDFNHKLIRAVFVVLIFISFIKLWKLFKFDGKESIKIPRKMEISPESDSLMNYIVTYFTPLLSFDMNNTTSIIMNSLLFLLIGLMYVGSNASYLNPVLGVFGFKIFGVTGFPHAHHIITNLSFDDIETARETDVELTSYRLGDGIYILKRK

SEQ ID NO: 93803 - protein, 325 aa, Streptococcus sanguinis SK160
MIPINVNDEKNGLASFSQQPDFDEYVKIFLIKIKKNEIFLYKQDADKKTKETVIKSIIESMGQSIFSNREIKPYDPVVTYKNVHEQVEVSNYGNIQSVISKFNDEQQHLLSSSSETEKTLHNYLVVIKKDDLINLKFIGSFVNAFQLEKKWIIGNFTDNKINLRNQNNLFGLNKKIDLMIVNDDKILINQAESKFDSIFGMNQKFAEQATEILNTNANIKTIFEQASINFLKTKVINGKRLATRLIKIVSDTNRFTETVKHIDKIQTIKNDSNHKFYKAIEGVTFSNGKLSITDEKNCVQLINAISDALVTAYISEVETVEEGRM

SEQ ID NO: 93804 - protein, 172 aa, Photorhabdus luminescens subsp. laumondii TTO1
MFLSKLARFALTATSVAPVCITLAYLAFIQKNYIMLGVYITIGVISVFLCIIILKYSIHHSGRTKKNIKTATPANKEVTNYFLTYLFPLLSASGTFFDWKIAAFFYISLLAYVSFSEGYSFNPLLSFFGYKFYEAEGETGISFVLITKRDLFLVNNDRLDVIKLTAHTYIVV

SEQ ID NO: 93805 - protein, 299 aa, Photorhabdus luminescens subsp. laumondii TTO1
MELFAITDTSKIVRIVTDSETQKSVNALFKKQKEYFENNYTTSVEFSGGYITSPVEYFCIDNFDDVIGVLDAIQTPTSIQEWSPQEISIFNIKALFSGEITSSETEDNIKAYLQCFDKRQIIDNKKTLFHSILQDKNTFKLSDSDGLIIDNKLTAILEGNKLKFKSFHMLRRIFDVDGYFKEATDDDLREFSNHDHFHISNNFDLTSLADTVIRKKVSLINKSRVLENYTVDALLAAANENGVVFDLDIHEDNGKRKIAMPQEKKHIKRLLCFLDEDYFTSQITQTLYRTNSKKKVNQS

SEQ ID NO: 93806 - protein, 196 aa, Leuconostoc gelidum subsp. gasicomitatum LMG 18811
MIKIQLFLISYIPLYGLVYLQLVADKYFQYQKNFKSNKILNNVLLIINENAVFGYYILALILFPLLFFIIYLGYRIKKDKGSDQLINRIKKSDDNIISYLMTYVIPFLTAGINVSAPIVTNFVLFLIIMIIYIRMDLVYLNPTLILVGYNIYIDSNDDMKYLTRNSSQAIQTSRQNHEKLKVTRITDSFSYIAKRK

SEQ ID NO: 93807 - protein, 325 aa, Leuconostoc gelidum subsp. gasicomitatum LMG 18811
MEEKEITSDTVLTDVKTVATMLKKAGADVRLYLLWKNKKETMFSYAETSKEIKDSFKKRWMNDYNDDKNQEITQFNVGMEKTDHLMFCSSEEFPLMKKHVEKTNTENDPKQFVEDLSTIRPKLNLVRGYCAHIYTDEENLYLFGSTNTFNSLTKSRGFGLIGNVGDKEITKLSDDDLIIGFNPKTTCYIHNSVCVIKNKKGFEDLFGLLEEYKKLAEETIKLFSNYPEFYQGIENFEDDLNRRPILYRSVVNFGKKTGIIESVSQHLDEIKMIKENDAFKAKYKDLKINDKGIVYTRSSLPLFLSLLNEEPVKSIITGNEFFAEH

SEQ ID NO: 93808 - protein, 199 aa, Faecalibacterium prausnitzii L2-6
MNLSLKHKLMLQSLSPLAFLTIVRNFKFTPVSELAENQSYWGEFVCLNNVLIVVFLLCATWILAAVISFVSFTAFRWTDKKQGYQLSSFVEKEDASLNFFMTMIIPLLIDDVGTIQGAVTFLIIVVMMCALLSKTHLYYANPVLAILGYRVYEVTFKSNPDFNNEVCLAVVKGGFLKNPSTVEYKVINDTVLYMKEMNK

SEQ ID NO: 93809 - protein, 315 aa, Faecalibacterium prausnitzii L2-6
MTKEEIQASIKSIMFSGSVCGIEIYACLRDESGYQTKKIRATDKLLSSTKDKVAGFINCTYLADDAEFDTSENIADNKKEFYEISLTESYSPFAFLDDAEKRTEYYSESDRNKLSGFLFKINLNDQYFWVYQHIYSISRIDRSKNVIALFIGDTYDEVDSDIVQIDSRADIIIFSSSAVTAKMDLMQRFFGFEQYIRAGAQKTIEIIRNLDIVDSLEKFVAFENKSKLTNAKKLLKAKNSPVLQMKKNDLLENLKKHSRYKTMFKFEEDHIVISSQKEAAAFIKMLNDDIVRSELTGKEYDSSSKMLLGPVGASQ

SEQ ID NO: 93810 - protein, 204 aa, Dysgonomonas mossii DSM 22836
MASENSKDINNLRIIPQIGLFITSYTPLFLIIIIKVIAKNSDFLYWGGFNWYSFQTFLSKFGLVTGATLIILLSFLIVKLTLMNLEASIDNGFLVRVNNVNNKSSEIISYIATYIIPFVYDANEPLDFLIMFLLIAIIFAIYINSPLLIVNPILGLKYGIYEVTFMQNGASKSAIVLSKDKYLLEGNVIKLLSIGHKIYYSKKI

SEQ ID NO: 93811 - protein, 343 aa, Dysgonomonas mossii DSM 22836
MLQELLNDIKDSDKKNLCLFFINRTLKPNVRSRDRVLEKYDYKVFQVNIDDEIRSYLYSLSLEQIEYAIKKKFDIVEYDIISDSTDQLYTYQMINKTMSFVSVVNDQLPDRSSIPQLQNLSELIEIGSLWAYCVGYLPDIAKPEDWIYTFRKIANTKLVIDEKDADNKTIKQKFIRVFFNNKSNKLQFLHGETITLDKQIDCIYKVDTFYILKKREFERMVGLEEDFKQQAEETIDKMAETNMFKGLDFIRKEIEESPSIHKKLIKIQKLETYQGLKQSDIKRMEKTARLFGSKLKTDDGKIVIEDKADIELAIRLLCEYYKEGMVTKKKFGTYSGKIMKTSE

SEQ ID NO: 93812 - protein, 181 aa, Parvimonas sp. oral taxon 110 str. F0139
MNLLFKILLLFSSYIPVIIMIFLNNLKSFTLYEILNVYNLNSYFWNLCLILSFISIIVLFLWLKILKKDAKSSTRLYELGSLDNNDGEVLNYFVTYIIPLLSLKVNETPSIIMNLLLILIEGIYFIKNNALHFNPLLLIFGYHVYTDTNNNIVISKKNLFTIKNENLKADQFGTSNIFYID

SEQ ID NO: 93813 - protein, 200 aa, Parvimonas sp. oral taxon 110 str. F0139
MYLALGQIEKLDTKPYNPVGSLDKTIEFTNTKEFECVKFLINSLETPTSSDDLESENINFLIYEFIPKDDEDNDNENIYKDKNFYFIRKHIKLQVFKKGFMGYIFKNNFKKIENTNLVGIDSYIDLIICDNEIVVVNHSSFERIFDLHKTFEDAAKKVLSNPKLKANIENFNELENGILSNLSYIKRVSKLLEKPNSLIF

SEQ ID NO: 93814 - protein, 171 aa, Escherichia coli 96.0497
MLNKLAKYLLTASSVAPVFFTLAFLSCISKHYKFMIAYLSLCAIILLLCVLIVKYAIKYNSVTSKKLTTASPADKEITNYFLTYLFPLISGPDAFMDIRIASFFAVSLFFYISFSGSYSFNPLLSFWGYKYYEAEDDTGVSFVILSKKPLLKASGNRVNLIKLTDYTYIAI

SEQ ID NO: 93815 - protein, 297 aa, Escherichia coli 96.0497
MELFAITDNTVGTRIVKIVTDRPTQNVITQLFNEQKTFFEERYTEGVEFSGGYITSGDEFFVIPDFDDVIAVLDAINNPTTIPPWEPEEISVFNIIALFSGYPEEDGKPATALIQSFDKRQVIDNRRTIFQKPFQASNTFCQSTEHGIVIDNKLTAILAGTELKFKSFHMLRRIFDVDAYFREATNEELTSFSSHEKFSVAPGFDLTTIADSVIRKKVSLINKSRILEDYSVTELRISAAEIGVVLETEKIGELEKIKMPQIRKDVKRLLHFLDEDYFTSHITRTLYRANSKRREDV

SEQ ID NO: 93816 - protein, 196 aa, Arcobacter butzleri 7h1h
MKNKLLFKIALFNLSLIPLYLIFIIQYIDISTILNFSEYENIAMFGKELLIINIKILFFILLIIIGFLSLLVFNKNNNYNRENAKKFESVESKDFDHLTFLSTYVLPLITFNLNDTHSFIVLIFLIVMIGAIYIKSNLYYLNPTLLLFGYKIYKAKDSQNNIVLISKTTLLSSCINSRYVDLGNNIYFLKDNDECR

SEQ ID NO: 93817 - protein, 312 aa, Arcobacter butzleri 7h1h
MNVDNLKSILQEILNSDVANIKLYATTKQNETKKISISSDVSDNLLELFKKSIEDMFLDDSKEYRLKSIDDNNDEAAKTYYYFNGENTYERLNVLHNLSSLDEEVFNFENTNLDDIETFYITISNGEKTIALYKKNYAINVLRRGKTIFFTKHNENIDELKKDILKIDHSFQFMAIENNILIVNLSMLETQLGYDEVITKKAQETVELIASLDFLEDIAKLEEMVQTKKIAKKINLVKNSQVLDIIQSDINKVKTFIDSIEDLKKSLKFTEDNKLKLNSKVGVERFLKLLDDAYLKSELTETLYDSLNKEKM

SEQ ID NO: 93818 - protein, 189 aa, Halopiger xanaduensis SH-6
MGRIPSWAKIVLFLSSYSPLFAIVALRAHDSTHSVFGYQLEPVGIGPVELSYFSLGFSALTVVSVVFLALMIRMNRTRQGQLSEIEHYRNRSDMFTEYLLVYIFPFIVFEFSNIYDVAAFLVLFLTVAAIVIRSNRLFVNPVLIGFRYRVYEIETEHDRRILLTKQELSGNDMTLNTARISSDVYITTR

SEQ ID NO: 93819 - protein, 336 aa, Halopiger xanaduensis SH-6
MSSASRVDARDHFDELVAFLQRIEDIDTSELGIDLLLARLNEESAEDYDYTFERISLDQELPEDLENLVRDKVEHKQSALESDNIRFSDYGIENRDRDQTFVQYEPTENIPQFDNFERLLEGQRFSHTTYTEPPKPEFQAIRIRDADNDQMAIAFLNYSRRQIMGRTSRARMLVGSEKHRKVDDSLISIPDRVDSIYYDGMMYIFDQSRFEKIFDYLAEYERCADDVIDRIEETDIPFHDFEMFKEAVYGNNRVLRLMYKVHERGVYEDMDLDDAAYIRDNFDTDVKFEENGDGEMSIKMDDKRDVWAVLRFFNDDHLDSPLTNEQYISLSKQDAG

SEQ ID NO: 93820 - protein, 196 aa, Prevotella multisaccharivorax DSM 17128
MVSFVPKFLFTATVTAPVFLSLGLIGIIKDSKNYFQYWNKLLENNIIPNSFEWWSINISFAFMLICLIGIKIFLRKKSCKCGKGKTIKAQFYSNLSQNSAEQVISSIIPWLTIFADRLDFMVLFVCIILQCCFIAIASYNNNNYNLLCSIWGYRYYEVKTEENTYILISKKCIRNKNEIKTFVELTDYMGLIINDK

SEQ ID NO: 93821 - protein, 283 aa, Prevotella multisaccharivorax DSM 17128
MSQFYALMHDNTVKYISLKEEIVTDVRNLFINGGAILKPEGIEEDVFDGNIVSRNGENITYVNYNLPEDFIHIPDNQADMSEYNINEDIPKSIFYYDDGKIYFQVFNKKNMLQRKMVLQFEHGNVFTKMNNTAFIVEDKVHAIYEDGKLYFQNYTIANQIFSLIDFITEATNTEIESFGEIEGINVSTENIKHIANIKTRRLIKLLSNTDNIATFMRKASRTRTSLLRKYGVNAQINENNELVLLTNNVADLNRVLEFLNEDIFRGVITDSLYRSNSKKKDNH

SEQ ID NO: 93822 - protein, 185 aa, Bacteroides sp. 2_1_56FAA
MGYKNNDLKKGAKFALFVSSYLPLFILVILRQLSDNYNYLHWGGISINSIKIFLSFFGLSSVLTLVSILGIIGLYNTLKNIEDISENGFNAQIIDIKNKNSESIGYIATYIIPFLFQSLNGWYEGISILFLMGIIYRIYINSSMILINPILSCKYSIYDIEYSKNKKLKTDLSYQKIIRYRMKIK

SEQ ID NO: 93823 - protein, 343 aa, Bacteroides sp. 2_1_56FAA
MILEDLLERLEDIEVSDTYLYFITRVLKQNQKKNSKVLDKYLFKVYQVDINDEIRNHLYSLTQEQLSYLINKKTEVHEYDVITDDTQHLFTYSMTNKVMSFADVVNNQLKAIPPKITSLEEIIENEELWAYCVGFQNQDEDNIFTFRKILAGKVAIDEKDSNNRKWIPKALRTVFNTKSQKLELIQGETVNLDKQVDCLYYNDIFYIAKKTQFEQIVGLEEEYKKQAKEVLTQLEETKMITGLEIINQQIESNPSIHKKLVRLTKIGNYKGIDTKAINKMQRICKKYGNQLNVKDGKLHIESENDIDLTLKMLADYYKKGEVSGKAYGTYAGKEIKEVKPIEK

SEQ ID NO: 93824 - protein, 200 aa, Lachnospiraceae bacterium 5_1_57FAA
MRRIILFVSSYIPLYVLLIIKNILERCTNEGKITLTLNQLKTSHYFDEINDYAIVILLFLCIGSFLYLKLLTKKTEGVHYYEIINIEDQTGNMYFNYISIYLLSCLGLTLNSIVDVFVLLFLMIIVGYIYISNHMTYMNPVLQFLGFKIYEGNVKSESTGKEIHSIIIVNNKTVIKPGGSYKGGGKEDFIFVIGESDSEK

SEQ ID NO: 93825 - protein, 324 aa, Lachnospiraceae bacterium 5_1_57FAA
MKKDDIKKELSIYKSAIENGTAEINVMFVDQNNQRKKRYKGLMLKTKLDDLKSVLIDSFAYVIDELDKRTLDIYDLEISVDESTQMVSKNDVIHGNEILDEITVDYTEDNVVTENTNLSKIKFMVIQIYTKKKSLYLFKKYVQPSTAYKTSEKYVFSGGILKPFMEEIITINSLVDAILLDEIYYVFNRNTFNSIFAYKDVFAKILNDNADMIRDSGLLTEADQFVSDCESDGRYLTRLTKVILAKGFDEVSKKKTEIPSVIKEFNLSLKTSAEGEIVYRGKEDIPELLNLLLRHYVIDALTSNKMIAAAIQEYQAGNRGGSNS

SEQ ID NO: 93826 - protein, 216 aa, Lactobacillus johnsonii pf01
MKHHDEIKNRLTLTIQSFFPLFVWFIIKYSVNPKKFIIKIEKDILLYKWNVDVYFRLAMRQYFLSGLITVISFVLCLYIVYELVNIREKESGGWDNDGENLKIIRQKNDVGVTFLVTYVFPLFIDDINTIRNFIILVSMIIFLILLLLRTNLYYQNPILIMLGYKIYVVQINNPENRNLLNKEIIAISRENLVEGRVIKKKKLSDNVYLMKLKERQ

SEQ ID NO: 93827 - protein, 323 aa, Lactobacillus johnsonii pf01
MMDVNKIKEKIRDMFCDKEFGFEVYIFMKDESLRHFLFSDKKRNKKNIIFEQSTQDMIVKTLKNTFCREDILYIDAVNVSDDQQGCYVIEQKDKSYAPFEFLNRQLNNGATKLNFKVNNVSEAQGIFFKFRRNNEVIWAYQKIWAVNIPNKSKKNKIFRQNDDDEFEELDNQMFVITPSINLLIVDKYILTNKINFLERYFDFEFYIRAHASDAVKNIRATNLITEDKKNILDKYIENVRKFHAKKMMKVTQFEVMRLSAEQLKEQIEKSKKWKNVFTFNDEDKINLNTFKDVDNLIDLLTERFTSSPITGDIFDTKVKSLVK

SEQ ID NO: 93828 - protein, 157 aa, Streptococcus equi subsp. zooepidemicus ATCC 35246
MPFILAIGLSKTFIEKNFKTGLTITVISFGLAAIQVIILRTAKKNIVPQRINISKISQEKESWVLAIYVSYFVPFIESSFGKNFNFTNWILVVIGIIILILSKRTTNNPVLSVLGYKVYSIETDHGIDMTLISKRDIRNKKAIDKVLRIFEYYVMEA

SEQ ID NO: 93829 - protein, 283 aa, Streptococcus equi subsp. zooepidemicus ATCC 35246
MSGVFIIDDNKVSIKKLETDNSTVISINGILSVDTEKYKANSVNFDGSYKPDEDESLKIENFDLPDEIKEAINNPLGVEKLIATDNDLNIRAVFLTLDDGEEGRIVFQRTQKRQLLLGGRITLFWNKDTFISTKKPGVVITDSIDAYYENGTLYFKSYYLANQILNLNKYYRQATDEDIRTFCQSSCFYVNDLDSLVSASNNWTRKKIAYILDTKVLETNSIDFILQDAKELGLQFQTNGENKIVFPEDLKAQKELLSYLADEIYKGRLTDDVYLTNSKRTLK

SEQ ID NO: 93830 - protein, 204 aa, Advenella kashmirensis WT001
MAQRETSAAMSDPSLRLRPLVSLLLFLSAYSPLLIILVIKDIDLHSPIFFRSPVLSGIFLLIAVGSSVITLRAVKEIDGGLPVVITKAANRSGDMFGYTIPYMLTFMRIDLGDWQTVLSLAILLSILFIMAYRTQTVFINPILAIAGYMLIDCTFKRGEKETQAMVITRAPISAGDSCRLERLSHYLYIAAQPEPKQSGEQDEQ

SEQ ID NO: 93831 - protein, 316 aa, Advenella kashmirensis WT001
MSSNKAKRQLAEIKSFDFSKWSVTFWLVKRKIVQKEASYAVLRVNIDVKLQQRFRGYLKVQLQDKEFHVSAYDFNNADGDDVLFTIATETTDFVKVAAMINDDFNNPHAKNYEELLNSWAYIVLFEKDGKRFFTWRKINADTQPKKVKSKNATFFQDHKLVDLEDKEVFLIDPQYDFFVYEGITFIANKRQFESAMNFREGMKANGAEVLADFEKLNIFDNVEIIKEFVGSNLHHLRKLSSIRKSGYYKQPDYMQKLIEVNNTEKWELQIVKNKIIVEKETVELLLKLLNNDRLRSPINHELFDSAAKAPVAQGGE

SEQ ID NO: 93832 - protein, 191 aa, Streptococcus mitis bv. 2 str. SK95
MQRDLFSKWTLFITSYLPLYLWLLLSNINYSKFSFERLVAFDFEHKLIRTVFVILIFVSVVKLWKLFKFDGKESIKIPRKMEISPESDSLMNYIVTYFTPLLSFDMNNTTSIIMNLLLFLLIGLMYVGSNASYLNPVLGVFGFKIFGVTGFPHAHHIITNLSFDDIETVRETDVELTSYRLGDGIYIIKRK

SEQ ID NO: 93833 - protein, 325 aa, Streptococcus mitis bv. 2 str. SK95
MIPININDEKNGLTSFSQQPDFDEYVKIFLIKIKKNEIFLYKQDADKKTKETVIKSIIESMGQSIFSNREIKPYDPVVTYKNVHEQVEVSNYGNIQSVISKFNDEQQHLLSSSSETEKTLHNYLVIIKKDDLINLKFIGSFVNAFQLEKKWIIGNFTDNKINLRNQNNLFGLNKKIDLMIVNDDKILINQAESKFDSIFGMNQKFAEQATEILNTNANIKTIFEQASINFLKTKVINGKRLATRLIKIVSDTNRFTETVKHIDKIQTIKNDSNHKFYKAIEGVTFSNGKLSITDEKNCVQLINAISDALVTAYISEIETVEEGRM

SEQ ID NO: 93834 - protein, 182 aa, halophilic archaeon DL31
MIEFRPWIKGGLFLSSYIPFYLIMALMNWSAVIDLSFIQFHAGLFFVLLTIVSGIILAISIRFRKGREPSRTHIGTVNRKNELLTGYLVTYLFPFLNMDLEVVQNWVALMLFFLVLGIIQYRSSQLHVNPVLTAFGYDIYEIEEADTGDILLLIAPKSEVVRGSGDVYTVKMGPETRLAISP

SEQ ID NO: 93835 - protein, 346 aa, halophilic archaeon DL31
MSSGDADVQTRLEDIRDYIWNQDDGEEGSPKTVSDDRLRDFIIGKDHEESISEFDYELGEVDLPPESLNSLHTLVNTQISYHIGRLEANKVSTTPYGEGLGDRDYVKYITSSKLPVLGDFEDIFTEEDLPSKRYESLNPDFQAIRIRGPDDLVIGFQHYWGNQLLGNTSLFNFLTKEGDFEPIDDPIISVPKRLDAVYHDEVLYIFDDWRFEQIFGYYRAYEEVSEEVMNTLEDSEIMFENMETVEKAILDNPNMMRKVSDVQRNGVYENLSMDDVEWVIGQHPEALEGVNVVDDDGERKIQVENRTEVWGLVHILNDDHVVSELAERVPELSDRVYRASKKEEIS

SEQ ID NO: 93836 - protein, 171 aa, Escherichia coli STEC_B2F1; identical to SEQ ID NO: 93814

SEQ ID NO: 93837 - protein, 297 aa, Escherichia coli STEC_B2F1; identical to SEQ ID NO: 93815

SEQ ID NO: 93838 - protein, 124 aa, Xanthomonas axonopodis pv. citrumelo F1
MVVVLRSVRLTHRVHVQEVKAIPNDLINYVLPYVVSFMGLSYGDPQKLGGFLVFWIGLFVITYRSGQILMNPLLIVMGWKLYEAKVALGQVGAVRIVRVLKKGALLPSIQIAEEIQDVYLMGDP

SEQ ID NO: 93839 - protein, 163 aa, Xanthomonas axonopodis pv. citrumelo F1
MAFQNGALSAVQEVDFTLEPGFDLFALDDSLLVGNKRAFESMMKYRAGFVDAFVELQEEKKFISLFTDMAPLVAHVGLNGTHLRRMAVIQERRLYENPKYLGTLREVCERHNWGIQFDAEGLIIPTEETARVIMTLLLDQRLISEITAIMYDVPGGHRVDAAQ

SEQ ID NO: 93840 - protein, 193 aa, Aggregatibacter aphrophilus ATCC 33389
MADSSLRLRPWVSLILFISAYSPLMVIMAIKQIDLTSPNYFNSPEIGIGLLVAAIISSIIVLQVVKSVRSGLMVVVSKASNKSGDMFGYTIPYMMSFMRIDLTDWQTILAIILFLTVLFTMAYRTKTVFINPILAIFGYMLIDCTFKRGEKEVQAMVITKQPISYGDTVCLDRLSHYLYIRSNSDYKNDKEKS

SEQ ID NO: 93841 - protein, 314 aa, Aggregatibacter aphrophilus ATCC 33389
MSTNTKKQIKEIQAENFNDWSVSFWLIKRKAPTTIKEASYHAWRVDMDKKLPTRFKGYLKNQLQGKKFHVEKYDYSNADCDDVLLTVDSGITDFEKVEAEINKGFDNPRVDNHKDLLNSWAYVILFEKDDKKLYAWKKINTDTQPKKVASKGILFFINKELVDPDDKEVFVIYPNYDFFVYKRTVFIASKKQFESSMNFREGMKRKSAEVIADFKNLETFKNIELIEQYVGNNLHHLRKMASILKSGYYKQPDYLKKLIAVNKKEKWDLKVENGQIVVEEETIDLLLKLLNNDRLRSPINDEIFDAAAKSKVNK

SEQ ID NO: 93842 - protein, 193 aa, Aggregatibacter actinomycetemcomitans serotype a str. H5P1
MADSSLRLRPFVSLMLFISAYAPLMLIILIKQVDFNMPYYLNSPIVSLILLIVAVSSSVITILTAKSVRAGLMVTVSKASNKSGDMFGYTIPYMLSFMRIDLSEWQTITAIILFLSVLFIMAYRTQTVFINPILAISGYMLIDCTFKRQEKEIQAMVITREPISAGDSVCLDRLSHYLYIRSQSDYQNKEESV

SEQ ID NO: 93843 - protein, 313 aa, Aggregatibacter actinomycetemcomitans serotype a str. H5P1; identical to SEQ ID NO: 93761

SEQ ID NO: 93844 - protein, 193 aa, Aggregatibacter actinomycetemcomitans serotype d str. I63B; identical to SEQ ID NO: 93842

SEQ ID NO: 93845 - protein, 313 aa, Aggregatibacter actinomycetemcomitans serotype d str. I63B
MKAQIKKIMKEIKEEDFNSWKASFWLIKRKKHPKDKSNSYSAMRVDIDDKLPRRFRGYLKKQRQDKKYHLESYDYSNADCDDVLLTIESEITDFSKIEIEIGKGFDNARATSYSDLLNSWAYVVLFEEDNKKLYAWKKISADTQPKKVASKNTIFFHNHKLVDLEDKEVFVIYPNYDFFVYQSITFISSKRQFESSMNFREGMKEKSDQVLSDFQNLSVFKNIELIKEHVGENLHRLRKMASILKSGYYKQTDYIEKLISVSKEENWELKVEEGKIVVEEETIDLLLKLLNNDRLRSPINNETFDASAKSRVD

SEQ ID NO: 93846 - protein, 193 aa, Aggregatibacter actinomycetemcomitans serotype e str. SCC393; identical to SEQ ID NO: 93842

SEQ ID NO: 93847 - protein, 313 aa, Aggregatibacter actinomycetemcomitans serotype e str. SCC393
MKAQIKKIMKEIKEEDFNSWKASFWLIKRKKHPKDKSNSYSAMRVDIDDKLPRRFRGYLKKQLQDKKYHLESYDYSNADCDDVLLTIESEITDFSKIEIEIGKGFDNARATSYSDLLNSWAYVVLFEEDNKKLYAWKKISADTQPKKVASKNTIFFHNHKLVDLEDKEVFVIYPNYDFFVYQSITFISSKRQFESSMNFREGMKEKSDQVLSDFQNLSVFKNIELIKEHVGENLHRLRKMASILKSGYYKQTDYIEKLISVSKEENWELKVEEGKIVVEEETIDLLLKLLNNDRLRSPINNETFDASAKSRVD

SEQ ID NO: 93848 - protein, 193 aa, Aggregatibacter actinomycetemcomitans serotype f str. D18P1; identical to SEQ ID NO: 93842

SEQ ID NO: 93849 - protein, 313 aa, Aggregatibacter actinomycetemcomitans serotype f str. D18P1
MKAQIKKIMKEIKEEDFNSWKASFWLIKRKKHPKDKSNSYSAMRVDIDDKLPRRFRGYLKKQLQDKKYHLESYDYSNADCDDVLLTIESEITDFSKIEIEICKGFDNARATSYSDLLNSWAYVVLFEEDNKKLYAWKKISADTQPKKVASKNTIFFHNHKLVDLEDKEVFVIYPNYDFFVYQSITFISSKRQFESSMNFREGMKEKSDQVLSDFQNLSVFKNIELIKEHVGENLHRLRKMASILKSGYYKQTDYIEKLISVSKEENWELKVEEGKIVVEEETIDLLLKLLNNDRLRSPINNETFDASAKSRVD

SEQ ID NO: 93850 - protein, 168 aa, Desulfobacter postgatei 2ac9
MRNWLKSLLFVSAFSPALLALAGVRYYSKGLDTVFYQLVVIALIGIILPFLILSLIRKKAEIINFKAKKVESADYLLLVFIGSYIAPIIMKVAEINFEITAIIVLILFFVAWIISYIPTHPLLYIAKFRFYKVESDTGMVYVLMARRIIRSPKSIKEVKQISNSMLME

SEQ ID NO: 93851 - protein, 293 aa, Desulfobacter postgatei 2ac9
MPLNLFALTNNPSKRIVKFELSNDVQEELTNYLTAQETRFTQAEEEIEFDGKYKPDDGEILFIDGYDDIDDLSSAVENPLSPEVVDPTEDFFAEIKALFTGYTAENGNVRVLLQNFDKRRIISTNGLSIFHSSNVYKKIEGIGLTIDHKLTATLESGKLKFFSFHNTRQMFDLSEYYKVATDDDVREFAALDIIKSENTEQLIEISDSWVRRKISLIHQSGILQNVPINEMKTVATEFNIPFLTEMDDSEEVIKLPDNKRDLKKMLRFLDEDYYKSPLSNTAFVTNSKRVVTI

SEQ ID NO: 93852 - protein, 215 aa, Desulfotomaculum gibsoniae DSM 7213
MNGNRKLRKLLILQSFVPLMFLLLLKNCEFNLFNLVCKFFIRIWKHDFSAITIAITHEKFLLLIVVVGCLFWILKGILAMFQFRNVQNSNFIEGDKIVIKNYSSDAGLIFFTTFIVPLVLDDIGELRNSLVFIGLLTMIIALMHKTNLYYQNPVLTILGYKTFQFYFIEDNNSAGMNNELIGITYGKIDESKIIKYQLVADDVYLIYNKTQHPIH

SEQ ID NO: 93853 - protein, 324 aa, Desulfotomaculum gibsoniae DSM 7213
MLKDRILHVINNMFQNTEYGFEAFVIMKNDNTLKRLVLFEGNPSNLSGQASENFKEKVNTTIAEFIKEKYLADDAEYEPVENIADNQNKFYVIEQTDQYRPFDILNTPINNLQTFNMTDRDNALGLLFMFRRGDNKIWGYQHIYTVTIPNKLRKNWLSIQQAETFKEMILPLFPIAKKVNLIIIGQEITTKDISLMQRQFGFETYIRNSAQTVIGDVSEIGLFENIEKLSSYVERSKLTYAKKMMRIRHSAVLRMSSEQLLNKVQTLPRWSGKFVIENNRIVLKTYNHVENLIDLLDERYTRSDVTGEEYSTDVKRLAPPIEQN

SEQ ID NO: 93854 - protein, 175 aa, Peptostreptococcaceae bacterium ACC19a
MYKILMFISSYFPLYMIIIITKYRYLNESKIGKLFLLIIFIMMMSSIISMFIVLTSSANTYRNISSIEKSDDSVISYLMSYVIPLYSIQDNTIEYVMMNTLLFFIISVLYIRLDLLYLNPVFALLGYVHYNSENFVIISNIKYIDLINVINNKNDLHVYEVTDTIFLARKKDNNI

SEQ ID NO: 93855 - protein, 302 aa, Peptostreptococcaceae bacterium ACC19a
MEINRIIELIEKSKNGDLYFIRKMTDGYKSYKPRTSDTLIEKITDMILHYLKFFSEKEQIVFNPMGYRDETIEKYKVKDIEDYKSLIESFEYPKIEGLEKEIDNLKSYCISYDVIDNNQNEKILLLRRINKLKKLRNNGFLIHFRGEELVDIDDEVFGIDNEIDLIIYKDEILILNHIALERIFDLTIQYKNKAKETLKILRDKVRISNFDKFEEDCLNDSRYKKALTKMLNEKELIEKSFDNHRNLIEIIDTFDLQIEYELYPEFILVYEYKNQIMDFLRIIRDSYYISINQNRPGCDEKI

SEQ ID NO: 93856 - protein, 195 aa, Pseudoalteromonas sp. BSi20311
MKFGEIWDKFELYIMSLWFLFFLIIVITVDIPMCFGDNCQFVGFWDVIKKNIVPAISLLLVLFGVIFYYRFDYRVSGSKKLPVEIVDIEDLNYEHLTFLTTYIIPLICFNLTSTRYLIALAFLLIVIGIIYVKTDKFYANPTLAVLGFRLYKVTIKTRTGIKENIVVITKDRLSELDQLKTLDLDDKVYFARKVE

SEQ ID NO: 93857 - protein, 324 aa, Pseudoalteromonas sp. BSi20311
MTIENLKEEISSVITAKGCSAEFFFLLDGDEGMCVKSVDINEADQTKLAEMFTESLSSNILLNDDLSLIPISSADDRKNALYEYDLDDIPDELSNLKKIIESEKFDPFSFSDDSLKQLEGVLILIGNQDVQLAIYKHHYPITLLQKDSGFSLTKMRGSNRFQKLDQDILKIDPKFQFIKLNGKYYILDIKALERFFGFHDAIKNIATQGVENIKSSDLVMDCGVFESRLDDITFSRKLVKSASQSPVLSVIPNREILSFTNTHPALKGKFKYSTDGSQFDLKTKKSQNLFLKLLNDDFLQSELTKKYYESVAKDNIEEAAENAA

SEQ ID NO: 93858 - protein, 199 aa, Leuconostoc citreum LBAE C11
MIKINLFLISYIPLYILVYLQLIANKYFEYKNTFHSKNVLKNIFRIVHQNSVFEYWILAVIVVPSLIFSIYVFYRLSKDKGSNQIIGNIKRFDDNIISYLMTYVIPFLTAGININSQMVTNVVLFVIIMIIYVRMDLVYLNPTLILIGYNIYTDNSDGIKYLTKNSPQQITTAQQNKEKLKATRITDSFYYISKRISKR

SEQ ID NO: 93859 - protein, 327 aa, Leuconostoc citreum LBAE C11
MTDYDKTAILNDVINIEKMLSEEDGKKVDVRLYLLWKDKKEMMFSYSELGIDIKNTFIKRWLHDYSNNDQVQEFSEFNVGMEKTDNLMFCKSDIFPLVQKYVKKTDLTNDPLQFVTDLTTVRPILNRVRGYCAHIYTDDDNVYLFGSTTTFNNLTKKTSLGMIGNVGKKEITKISDDDVMIGFNPKTTCYIHDDVCVIKNKKGFEDLFGLLEEYKKIAKETIKLFSKFPDFYQGIETIQNDLDKRPILYRSVVNFGKNKGIIGRVSQHLEKIAEIKSSNIFAEKYHDLEINDKGIVYNEKALPLLLSLLNEEPVRSIITGDEFVAEH

SEQ ID NO: 93860 - protein, 173 aa, Klebsiella oxytoca KCTC 1686
MNKIARFLLTASSIAPVGITLIFIGYMKNKPWLIWWSLGICLASFISVIFFLHYANKNLPSLYKNVETISPANKEVTNYFLSYLFPLLGTDSIADKWQYAVFFYISLIVYICFSENYNFNPLISALGFKFYEAEDDTGVGFVLISKEVITNLKNRDFEVIQLTDYTFMHVTRK

SEQ ID NO: 93861 - protein, 213 aa, Klebsiella oxytoca KCTC 1686
MSLFAMMNKNSAVKVYRIDTDRQTDIKIKKIFDDQLSLFESHHNTELVFEAGYTPSYNECSYIDNFDEGKILLDAVQRSTAMPLWTKNVGLNDITAFFMAPAYPQVKDKIAIQTFSKKQILNESRYLWLSKNSFTMSDLLGFNLDDKLVAILEGDKIKFRNFNNLRSIFDMSSYFAEATKQEISDFVNQPVFNIPVGFDLPALADNVIRKKSH

SEQ ID NO: 93862 - protein, 193 aa, Aggregatibacter actinomycetemcomitans D17P-3; identical to SEQ ID NO: 93842

SEQ ID NO: 93863 - protein, 313 aa, Aggregatibacter actinomycetemcomitans D17P-3; identical to SEQ ID NO: 93761

SEQ ID NO: 93864 - protein, 195 aa, Pseudoalteromonas sp. BSi20439; identical to SEQ ID NO: 93856

SEQ ID NO: 93865 - protein, 204 aa, Pseudoalteromonas sp. BSi20439
MLILIGNQDVQLAIYKHHYPITLLQKDSGFSLTKMRGSNRFQKLDQDILKIDPKFQFIKLNGKYYILDIKALERFFGFHDAIKNIATQGVENIKSSDLVMDCGVFESRLDDITFSRKLVKSASQSPVLSVIPNREILSFTNTHPALKGKFKYSTDGSQFDLKTKKSQNLFLKLLNDDFLQSELTKKYYESVAKDNIEEAAENAA

SEQ ID NO: 93866 - protein, 195 aa, Escherichia coli O55:H7 str. RM12579
MQRNTYNKVGLYILSLAMLFVFIIILTAKIPFCFTSDCSFIGLKKLVLTNIVPIVCFVFFLFSIYFYNRLKNITKYNGQDSVKITSCQSESYESLTFLATYIVPFMGFSFEDMQKNIAYLLLVVVIGIIFIKTDKYYANPTLALFGFKLYRVNILHPGSGETKNLIAISNDVLKVDDNVYYSFFDEFVFIARKKI

SEQ ID NO: 93867 - protein, 315 aa, Escherichia coli O55:H7 str. RM12579
MTTQQLKEKISKIIDNFSGIRVVFTTTANELKLSRIEGSALNSIAEGFIDKIKEDIINNEDLTSPLLSNFDDRKNALFKFDYEQYPEEFNKITQAIAIPPNSQDYYNPLNKFTDVKGIIILISGDNKCLALYKNKTNLAVLRNSRKMFNLVPDPDGYLKQLPNEILRLDFNYDLFSIGEDFYIKNHKTLETQMKFHQVIEAQAVIALNSLRDSLLIEDISGLEKSSREISFARKLAKISKHSPVLGKIDTKTIIDYVSQHKYLSAILQINEAGDKLLIKTKTSQKHFIKLMSDDYLQSDLTKIIYMSIAKDRLDE

SEQ ID NO: 93868 - protein, 174 aa, Lactobacillus plantarum subsp. plantarum NC8
MAYFYIILCTCFYNDFFKKPKKFSSSDIYSTWKLNPIFWFLLLIISIVSIIILFCWLHFLKKESQGNKGAFSIKKLNAYDSEVLNYFVTFIIPILSLDPKSSPSIVMNFLLLLVEGIYFVSNNALYYNVLLILLGYHIYTFDTDNIVVTRKKRNELSFNESKASQIGTTNIFYI

SEQ ID NO: 93869 - protein, 303 aa, Lactobacillus plantarum subsp. plantarum NC8
MNIKNALNVVSSDNIKVRLHLAHWSTGGNIKVITPTIEDDFQKQLKSIVEDQLNKCDGLTQSDYNVVGANDDILETANFHKYKQHVNTVLDAIDVPNQKFRFANDNFDFFIYEFCYDDEDNNARKVFAFRRTKKLKSFKKGFIGHFVEGHFKKIIENGLLGNDGLIDLIVYDEEIAVLQHIAFERIFRLSNEFKELAEEVLKNDTFNKKIINFSKLKEAALNNRSYIKRLSKLDSTNTATLFLKDLQKTKVVVDELNLDIDIDLESNQMQYRDETQLGNFINLMQDAYYKTLIGNTPGLDERR

SEQ ID NO: 93870 - protein, 197 aa, Klebsiella oxytoca 10-5245
MDSRPYLKTVLYILSLWLLFLSLLIMSYDKVLIKNVWDYIFTENITLSISSLKVRNIVFIVSLIFIFIGAIILIVLANSFGSGWSVACTVSDISNENHEHLEFLTTYIMPLVFTDVDSKRTVLNLGLMIFVIGAIYVKTNRFYSNPSLAILGFRIYKANVHDRGVKKCTVICRSVLKSKDNIKYIKIDNETYLAKIV

SEQ ID NO: 93871 - protein, 323 aa, Klebsiella oxytoca 10-5245
MFTNIENISKSKRISGEAFFVADIQGTIDIFKVNLEPNAEKDLTTSFSKSLINNIIEPNRGKVAVPLVSTLLERDKQVFEYDHLAINHLPIEFTKMNNVLNFGVNGNATQFDFATQSLTSVKAVIYHLCDGNGNSVVIYQHKYPVSLHKKTKKSFLSLNGRTLDKITHDSIDINDTIDFFFFQNKYYALNIKLLERMYGLESVIDNLANNSTPLIINLGIVNTQGMPVPLDIFKDMYKDRAFMRRLAMVSKGNLVKTGVSVPQIQQVMQKFPVFQRNIDLTGGLINLNTKDQKRYFIRLLNNEASFAALDNSPFLAVEKDSAA

SEQ ID NO: 93872 - protein, 89 aa, Escherichia coli DEC1D
MGFSFDDPQKNIAYFLLIVVIGLIFIKTDKYYANPTLALFGYKLYRVNISHAGSGEVKNVIAISMDVLTVDDQVFYSFFDDYVFIARKK

SEQ ID NO: 93873 - protein, 319 aa, Escherichia coli DEC1D; identical to SEQ ID NO: 93789

SEQ ID NO: 93874 - protein, 198 aa, Escherichia coli DEC5E
MKSKGTFNKIGLYILSLMLLFVFIIILSAKIPMCYGDSCEFIGFYKLAIDNVIPIICFFFIFLACYFYKRFRSLIKINNADTVTITSCQSESYESLTFLATYIVPFMGFSFDDIQKNIAYLLLVIIIGLIFIKTDKYYANPTLALFGYKLYRVNVSYTGSVEVKNVIAISTDILAVNDKVFYSFLDDYVFIARKNNDS

SEQ ID NO: 93875 - protein, 319 aa, Escherichia coli DEC5E
MTPEILKREVSDIFDNFTGIRIIFVVKIEDSYSLKLSKIEAGALPKIVEGFKRKIEEDMIENDDLTIPLLSNFDDRKNALFKFDYEEQPKEFGFIKSATAIPPNSQDFYDLRNKFTDVKGIIIQLRGNNKCLSLYKNKTNLTVFEQSRKLFNLIPDSDGYLKELPNQVFRLDYNYDLALLENDFLIKNQKTLEVTMQFHQVIEAQATVALESLRSSSLIDDLSHLEKSAKEISFSRKLAKISKHSPVLGKIDVPVIIHYVSHHTYLSTVLIVSEDGRKLIIKTKESQKHFIKLLSDDYLESPLTKILYDSLAKDELKTN

SEQ ID NO: 93876 - protein, 109 aa, Escherichia coli DEC5E
MSNVKNQTHEHLEFLTTYVMPLVFTDVNSKRTVINLLLMICFIGVIYVRTNRFYANPSLAILGFRLYKCVIKNDPSGKEYTVICRGKMSNDCQVKIKKIDDDTLIAKLI

SEQ ID NO: 93877 - protein, 195 aa, Escherichia coli DEC5E
MKNELEAFVQNNGLTGEMFFIINDNDNYIYRRVILHDENTEPLITENFKKSITDEIIKRISINDNGDAIIDNITDMNYEHKGVYYFDIASEDKSTIIKIIEEISSLTVADNPIDFKFNDVNLDNIIGLVYHMSDGDKNIFLYQHRYPNFLHKKSRLSFLGEGDVLVPIPYDMINISKVIDFLFLMELVMLLTLNY

SEQ ID NO: 93878 - protein, 109 aa, Escherichia coli DEC10E; identical to SEQ ID NO: 93876

SEQ ID NO: 93879 - protein, 335 aa, Escherichia coli DEC10E
MKNELEAFVQNNGLTGEMFFIINDNDNYIYRRVILHDENTEPLITENFKKSITDEIIKRISINDNGDAIIDNITDMNYEHKGVYYFDIASEDKSTIIKIIEEISSLTVADNPIDFKFNDVNLDNIIGLVYHMSDGDKNIFLYQHRYPNFLHKKSRLSFLGEGDVLVPIPYDMINISKVIDFFVFDGISYAINIKLLEERYGLTQVIDNMVSEVTPKIIEMEIVNKSVLAEPEKIFDDMKDDRGFMRKLARVLKNGILELNIDVNIVNEIKTSFPTIGRNIDIINDDNGMQYIKLTSKARKKAFIRLLNDEAVRSVLTQKPSIAQNHKPEKNITPT

SEQ ID NO: 93880 - protein, 172 aa, Escherichia coli DEC11A; identical to SEQ ID NO: 93790

SEQ ID NO: 93881 - protein, 294 aa, Escherichia coli DEC11A
MALFAVIDNTIATRIVRVELDATASTSVTAIFQQQRQYFESHHNNMIPFYAGYTPKHSECFEIQNFTDSARLIDAVNRPTAVPVWDPSQIDIGYIKALFVGVDAPANPNIIALQTFNKKQILDTSKSFFGKLFASKTTFSKANSIGFNVDDKLVAIIINDTIRFKSFFNLRSIFDMSSYFSAATDQELNAFSQLSVFSTPQGFDLKSVADTVIRNKVTLINQTGMLTPQNMSKFKSEAAKVNFPLQTIIVGGVEKIVMPSSKKEIKALLDFLEEDIWISGISGRRFKSNSKRPI

SEQ ID NO: 93882 - protein, 172 aa, Escherichia coli DEC11B; identical to SEQ ID NO: 93790

SEQ ID NO: 93883 - protein, 294 aa, Escherichia coli DEC11B; identical to SEQ ID NO: 93881

SEQ ID NO: 93884 - protein, 109 aa, Escherichia coli DEC14B; identical to SEQ ID NO: 93876

SEQ ID NO: 93885 - protein, 195 aa, Escherichia coli DEC14B; identical to SEQ ID NO: 93877

SEQ ID NO: 93886 - protein, 109 aa, Escherichia coli DEC14D; identical to SEQ ID NO: 93876

SEQ ID NO: 93887 - protein, 340 aa, Escherichia coli DEC14D
MKNELEAFVQNNGLTGEMFFIINDNDNYIYRRVILHDENTEPLITENFKKSITDEIIKRISINDNGDAIIDNITDMNYEHKGVYYFDIASEDKSTIIKIIEEISSLTVADNPIDFKFNDVNLDNIIGLVYHMSDGDKNIFLYQHRYPNFLHKKSRLSFLGEGDVLVPIPYDMINISKVIDFFVFDGISYAINIKLLEERYGLTQVIDNMVSEVTPKIIEMEIVNKSVLAEPEKIFDDMKDDRGFMRKLARVLKNGILELNIDVNIVNEIKTSFPTIGRNIDIINDDNGMQYIKLTSKARKKAFIRLLNDEAVRSVLTQKPSIAQNHKPEKISLPHDIINS

SEQ ID NO: 93888 - protein, 200 aa, Clostridium perfringens F262
MRTLGKIIMFLSSYAPLYIFIITLNFNLSEIKNSLYKLSDISLINQNDVILYIMILLVIVPNVILKKMLNDTKEYSETIKVINIEEADDKILDYILAYIVTFMTTNYVDFKNSDSKIIFTGLLIQVLLGYLYCRANMFYINPVLNIIYGYHIFVANTENKTIIILSKKQENVLELKKEIYESSYKRIKLNCFSNGIYIYK

SEQ ID NO: 93889 - protein, 301 aa, Clostridium perfringens F262
MFNLDEAREFLREVEGFDLDCIFISKEYELKKALLQENLKNEIIENLINRFNKITKEKNVVEYDPIVKLEDSIDSISIEDVSKLNLIEENLKAIEAIEEIQSFDEIYDSRAYVMILKKDDMNLMFFKKFISSIYLKSKMKLLWLEGRMERLDKDIISIDDKFDCVGFSNNLLVISKPAFEQIFDYKDEYTKKANENIEHMNKLSIIKNIELLAMECEKVTIKKKLAKIKKDQIEWFKDQIENNFNRVEHIIDKAGLDIQVIEGELNINDVSELIHLIQNDYLKSEIDDENYIADSKRPIKQ

SEQ ID NO: 93890 - protein, 181 aa, Emticicia oligotrophica DSM 17448
MKKIQLYVISLWLLFFLVAVKEFVFISWQLSFTFEGLLTFLKPNIIALIAISFSLLGLFFYARFEYFLKGATKLPKKITKIEDQSYEHLTFLTTYIIPFLRVKLEGKDLVVTILLLIIIGAIFIKTNLFYKNPTLALLGYKLYKVDTEKNTGLIFISKENLKLGDSVHHIFLSDNVYFVKL

SEQ ID NO: 93891 - protein, 320 aa, Emticicia oligotrophica DSM 17448
MNREQLIARLNYFLNPENGIGAALYFVLHEDGETIIRFADIENNVKQELKERFLEYISDKFITNEDFDYQNISEVDDRKNVVYKYDLDDRPNSLDILDDILLNENQPNFNFNQDSFINLQGYLITIGNEGNKMALYKKHHPVNLLKRDRFLLIPSNQRLVKIQDDALAIDRSFDFMMLDGNLIVLKLNILERFFGFEDVIRNQAQNTIDLIEANQLLEDIKQINDIAQTMSNARKLMSIRNSPVLNVPVINVINFIKNHPELTGKISFNINETKLNLNTGVSKRLFLKLLNDDYLFSQLTELQYDSHAKDKLTEIENNVN

SEQ ID NO: 93892 - protein, 181 aa, Emticicia oligotrophica DSM 17448
MKKIQLYVISLWLLFFLVAVKEFVFISWQPSFTFEGFLTFLKPNIIALTAISFSLLGLFFYARFEYFLKGATKLPKKITKIEDQSYEHLTFLTTYIIPFLRVKLEGKDLVVTILLLIIIGAIFIKTNLFYKNPTLALLGYKLYKVDTEKNTGLIFISKENLKLGDSVHHIFLSDNVYFVKL

SEQ ID NO: 93893 - protein, 319 aa, Emticicia oligotrophica DSM 17448
MNREQLIARLNYFLNPENGIGAALYFVLHEDGETIIRFADIENNAKQELKERFLEYISDKFITNEDFHYQNISEADDRKNVVYKYDLDDRPNSLDILDDILLNENQPNFNFNQDNFVNLQGYLITIGNEGNKMALYKKHHPVNLLKRDRFLLIPSNQRLVKVQDDALAIDRSFDFMMLDGNLIVLKLNILERFFGFEDVIRNQAQNTIDLIEANQLIEDIGQINEIAQSITNARKLMRIRNSPVLNVSVINVINFIRNHPELTGKISFNLNETKLNLDTGVSKRLFLKLLNDDYLFSQLTELQYDSHAKDKLTEMENND

SEQ ID NO: 93894 - protein, 211 aa, Escherichia coli 541-15
MTSTNSNSASCDNIKFKYYLYFLSLWVLFLSVSIMSFDWVFIERLVRFILLKYTFEDVFNNFNKLKVRNFVFIFCISMVFSGISSVVYLFSSLSRGWGSTHKVSNVKNQTHEHLEFLTTYVMPLVFTDVNSKRTVINLLLMICFIGVIYVRTNRFYANPSLAILGFRLYKCVIKNDPSGKEYTVICRGKMSNDCQVKIKKIDDDTLIAKLI

SEQ ID NO: 93895 - protein, 335 aa, Escherichia coli 541-15
MKNELEAFVQNNGLTGEMFFIINDNDNYIYRRVILHDENTEPLITENFKKSITDEIIKRISINDNGDAIIDNITDMNYEHKGVYYFDIASEDKSTIIKIIEEISSLTVADNPIDFKFNDVNLDNIIGLVYHMSDGDKNIFLYQHRYPNFLHKKSRLSFLGEGDVLVPIPYDMINISKVIDFFVFDGISYAINIKLLEERYGLTQVIDNMVSEVTPKIIEMEIVNKSVLAEPEKIFDDMKDDRGFMRKLARVLKNGILELNIDVNIVNEIKTSFPTIGRNIDIINDDNGIQYIKLTSKARKKAFIRLLNDEAVRSVLTQKPSIAQNHKPEKNITPT

SEQ ID NO: 93896 - protein, 180 aa, Shigella flexneri 1235-66
MILLIQDFDDSKYKRHLCFDLLTSDSCNLPFKEPLLSVSLFLICLVCFLLSWLILKLAKSDEQKIRILEVKYTPSDLMNYVLPYIVSFMSINYQETNKFFGFIVFLLWLFWLSYKTGQIILNPILIVFNWKMYEVTYRHPGSKNTHSGVVLSNLSISPDSDYEYQTIQSVIIISGDKDET

SEQ ID NO: 93897 - protein, 151 aa, Shigella flexneri 1235-66
MKLKELQDFDIQSATLSVWVFRKQTVKSNPVYRGKWITVVPELKTELTEFICAERGKYTETIEYSLLAQNNEASLMLIGSGETSAVAITALSADQTQARKVKEIKELANCDFYSVKLVSGDTVLHCVKKTDPSWATKNNPDYDLLFSKTIN

SEQ ID NO: 93898 - protein, 196 aa, Bacteroides salyersiae CL02T12C01
MVSFVSKFLFTATVTAPTFLSLGLIGVIKDSTNYFRFWDEMLENRIFPTSFEWWGINISFGFTLICLIGIKIFLCKKSSKYKEGKTIQVKSYSNLSLNSAEQVISSIIPWLTIFADELDFMVLFVCIILQCCFIAIASYNNNNYNLLCSIWGYRYYEVYTEENTYILISEKCIRNKNEIKKFVEVTDYMGLIINEK

SEQ ID NO: 93899 - protein, 283 aa, Bacteroides salyersiae CL02T12C01
MSQFYALMPDNTVKHIPLKEEIITEIKNLFINSGATFKPEGIEEDVFDGNIVSRNGENITYVHYDLPEDFARIPCNQADMSEYNINEDMPKSIFYYDDGKFYFQIFNKKNMLQRKMVLRFEYGNVFAKMNNSAFIVEDKIHALYEEGKLYFQSYTVANQIFSLINFVTEATNAEIESFGELDGINVNTESIKHIANIKTRRLIKLLSNTDNISTFMRKASRTKTSLLNKYGVNAQINENKELVLPTNNVADLNRVLEFLNEDIFRGVITDRLYRSNSKKKDNH

SEQ ID NO: 93900 - protein, 186 aa, Staphylococcus epidermidis NIHLM018
MKLLNKILLFISSFIPLYIMLIIKEIGRLTGSKNFCKDNITICVYWTVLFLLLIVSIFGILKIIVCDKGNRTKSIEVNLEKQGDNVISYIMTYIVPLLSINPNDITNLIQNIFLFIIIGIIYVQQNLLFLNPIFSLLKYKFYKNENNEIILSKLNIEELKLQKKEGRKVFIRQIDEKFYIIKGIRK

SEQ ID NO: 93901 - protein, 316 aa, Staphylococcus epidermidis NIHLM018
MDLESIFNNLKKMNEDEIKKSVTFSLIKKAENDKEKNLFYEFDIEGDVQLDLFDLVRKYFNDKRIRDRATQKYDAVIQRRGDKGFYLIKKDDYTQVSNFFEAIKNDTRIKTSKDFDIDDFIAYVVTIEYSSNKYVYYIGEISALTSLNKTKFIGNITDKKLKKISEKNLVGFNQTMAMFIHDNEMLINQIRIFEKLCNMHTEFKKIADELLETISSYKVIDNFEEFKNEVEIDDKFSRRLAKLSETPDRVIAFLKNIENAKDVLDSPDFKDKFKGIILKENKLVYDKTMTQQFITLISDSAYESIVGKQKRLDETF

SEQ ID NO: 93902 - protein, 175 aa, Staphylococcus epidermidis NIHLM020
MKLLNKILLFISSFIPLYIMLIIKEIGRLTGSKNFCKDNITICVYWTVLFLLLIVSIFGILKIIVCDKGNRTKSIEVNLEKQGDNVISYIMTYIVPLLSINPNDITNLIQNIFLFIIIGIIYVQQNLLFLNPIFSLLKYKFYKNENNEIILSKLNIEELKLQKKRREKSIYSSDR

SEQ ID NO: 93903 - protein, 141 aa, Staphylococcus epidermidis NIHLM020
MAMFIHDNEMLINQIRIFEKLCNMHTEFKKIADELLETISSYKVIDNFEEFKNEVEIDDKFSRRLAKLSETPDRVIAFLKNIENAKDVLDSPDFKDKFKGIILKENKLVYDKTMTQQFITLISDSAYESIVGKQKRLDETF

SEQ ID NO: 93904 - protein, 168 aa, Nocardia cyriacigeorgica GUH-2
MQIAARTPLFFSSYTPLFAILAARFAATPWLAFGALALMALGAGCTVWVLYLLGSSARSSLTVARVHETGSESGGYLVSYVLPFLTVETPGVLDALGYGLFLLVLLIVYVRTDLIQVNPMIYLLLRRIVKVQTGTGDMAYVVVRSVPRPGDTVTVAQHAGIRVMTERR

SEQ ID NO: 93905 - protein, 329 aa, Nocardia cyriacigeorgica GUH-2
MSTRDGRAWADIDIGGEPIDLLLGWRDGRKHLQALRIEFAAALGAELRGIAAATLDRLAGMAPIEYDTTATLVDGEEFFSFSLDGFDGQQPGAEPGEPDAQIAGLLRLIARSAMLDTVLPRQMRDGTFLFYVLICESSGPDRHRTAFVRLQHGLRVASAHRILATFGERLNRVGDPVFAFAEEFDLVITADEIAILKPDTFLRLFTDLELLTKATPDFVDHISEALGLDLAQPVKDTIIAVCAKRPSYAKLLKRLSGVDYLPKVTLTSLQAEIERYPELPEGIQIGESGIVLSDQGVPTFLEILDQRIWRGPFDDSSRVATAYRRLRPR

SEQ ID NO: 93906 - protein, 207 aa, Bacillus cereus HuA2-4
MVNPLWFRMSLVMSAYFPLFLVLLIKFCNFEFFYYVMKYWKFAGILFELEIGSSKGILSFMSIIMFLISLMCCIYVIYEIKNTQRNRVGQINIRLKEIQSRDKDVLVYLMTYVLPLVSLNTQSTKEIVIFCILIAMIMWLSLNSDLLYINPLITLFGMKLYAVECELGNVIIISHEKNLERKIDESLTCYRLVENKILLSGLNRSGT

SEQ ID NO: 93907 - protein, 319 aa, Bacillus cereus HuA2-4
MQLNLETFKEQFCQIRDTDQNAFRLFIVGTQLREGTASVYDECNPAELVVEGEVQDWLLNVTQPFLSNLLEYELVNMSEADDEGSTLKRFISLENLNQLNEWANTITRGHGVSNASELINREGFKPKALIAKFQIGETPIYFLKVLNEGVLLKRKTILTYDVGRGRYIIEDGRNKKLYLDEQWDGIIFENNVVLYHENKILSLFKYYEKFREAAERVVEQIGDLDILSDGTDLGQFIESQVMLQKKLARAADYEFETISRERIVELIQEGTIQLNLNDEGKIECTTKEEARIVVDVILDNFVTSLITENKYRARNKSKI

SEQ ID NO: 93908 - protein, 195 aa, Aeromonas hydrophila SSU
MALDEILKKFELYILSLWLLFFLMIVVTVDIPICFGENCYFIGFSSFFSKNIIPLISLIFLFIGFFSYLRFDYRISGSKKIPSRIDKIEDLNYEHLTFLTTYIIPLICFNLSSVRYAFALAFLLFVIGIIYIKTDKFYANPTLAVLGYRLYKITMTSRNEVRENIVIITKERLTKNDQIRIMNLDDNVCFARKVI

SEQ ID NO: 93909 - protein, 329 aa, Aeromonas hydrophila SSU
MTTIENLKRGVSSTISSNGCSAEFFFLFDDKNGMRVKSVDINESDHDELEKIFIKSVTDTLLLNDDLTLISLSSADDRRNAIYHYDLDDVPISLTYLKEIINNDKIDSFKLSDDDLSTLEGILILIGNQDSQLALYKHQYPVTLMKPDCGFSLMKPKGNNRFKKLDTDILKISSKFEFIQYDNEYYIFDIRALERFFGFHDAVKNIAVKGVENIKNTNIVMDCNVFNARLDDISFARKLVKSANNSPVLNVIPNSQIINFTQSHPALKGRFKYSKDGLQINLKTKKSQDLFLKLLNDDFLQSELTKKYYDSIAKDSVDINEDRVELAVT

SEQ ID NO: 93910 - protein, 191 aa, Kineosphaera limosa NBRC 100340
MRALVAVGLLASAFAPLVAVLAVLQLPALGWWAWALLAGCLASVVLLLAVLRSLGGIQARPLHARQVRRADERVVAFTSSYVLPLVVAAFGPETPAKVVATVALVALMALIYVRAGLFHLNPTLALLGYRLYEVTATNGTVTMLLTTSRHLRQDATLHCRYLGDDVAIEGRVDGRRSGRAPAAESTDGEAT

SEQ ID NO: 93911 - protein, 321 aa, Kineosphaera limosa NBRC 100340
MTLEPARQALEAAAAAQSASLENFVLRGRTLADATAWRIDLEQDLAQQVGDDVRGGAGALADKQLLPYDPAYQTNSSQVLVEELAGVPELAAVDARLRGGDLPPDPVGDGPESDPVLAMVHVVGDGATRLAAYRFKGPGIAVRQRGIALLPRAGVYRRVRDDLLFYDDRFDAYTLGESVYFTTVSLIQTKLAADDKARRLARQTLREVTRDVRIDGYELLAQAVADDPTLRAKMASVARMVRDDPEYAAKLTTQALVDFVQAHPQYDIPVATVDGREVLRFDPAPRHRHQIPRLLADDYLHSLLTDRSYEAGSKSRVRFKG

SEQ ID NO: 93912 - protein, 198 aa, Alteromonas macleodii str. 'English Channel 673'
MDLSNTLDKIGLYVLSLLVLFVFIIFLTVDVPLCLGERCDFVGFSALADITWKNFSSILSLFGLVAGVYFYFRFENEVKGSSLDVMTIEKSSSESYEHLVFLATYILPFIGFTFDEPRKTIAYFLLLAVIGLIFIKTDKYYANPTLALLGYKLFKAEVRCRGTQYKNMVIISKSELSEGDQVNFKFLSNSVCFARKVE

SEQ ID NO: 93913 - protein, 317 aa, Alteromonas macleodii str. 'English Channel 673'
MTVEQFKNKVSAIVDDCVGIKMFFVVGEANIKDSDVDNDALVRLKTSMVARLKTGIVENESLSIPLLSDADERKNALYRFDFDDKPLEFDLLEQALQLRVNAPDKYQVGDGNFDDISAIIVVLTGRNNETITLYKHQYTVSVLKAEQGALNLFKSNNRLSELDSNILKIDPNYVFLKLDNDYYVENVKTLESYLGFHDVIKDTAAKCVAKLTDMALIEDTAPLVERVEGEDMAFSRKLAKVARNSPVMGAVANNDIIVFAQKHEYLSKLLKLNDAGDKFVLKTKKSQDHFIKLVSDDYLESELTKIQYDSLAKDKLS

SEQ ID NO: 93914 - protein, 171 aa, Methylocystis sp. SC2
MLSGIARLMLTASSMAPIGFTYAWVAFTQNEKVVAVIAASFSVIAVISCVFTISYAKKFLERMNFKAAAVEAADKENIGFMLLYLLPLFTDKINTLNWQLWIPVIGIFSVITATGYSYHFNPLLGLMGWHFYKVESTDGVTFVLITKKHLRTAANKLVVGQLTEYILLDME

SEQ ID NO: 93915 - protein, 290 aa, Methylocystis sp. SC2
MTNLFAFCRQANQPVIKRVSVTGPVQAKIGGIFQGQEAAFLEGVSEEVDFGGDWKPDDDEILVIDAPDEAQLLAAAVSGNAMSYPAIDANNFLSEAIKALFISVEDGANHRILIQKFSAQQILNNTKFCLMLDGNTFKELTEKAFSLDNHITAIIDGNRLKFKSFFMVKRIFQLNNLYIAATDDELDTFCTHDSLQVTSADAFKALADENVRKMVHAITRTNVLHNCSVDEISEKATALGLDISVEGGKIVIPSEKKRIKELLRFLDDGIFEAPLTSRKYIANSKRPFGV

SEQ ID NO: 93916 - protein, 181 aa, Amphibacillus xylanus NBRC 15112
MTGFFRVMLFISSYSPLYLLIIVNIFPFWEIRDLTWPLPIMEIIVCGVLLFLFVISFSPIIYISKCELNETIESKKVRKKHEETLSYLVTYIVPLLVIDITEVNTLITNMLLFLLIGFLYVKSNMIHINVLFLLFGWNIYEDSKGRIIITMEEADYFLRQEKIGVKLMVRNLGGGIYLHRK

SEQ ID NO: 93917 - protein, 307 aa, Amphibacillus xylanus NBRC 15112
MNIGKIEDGITKILVSNSSKVSLFIIEKLDTKDGLDYISHKPSLDLELQKEIIKVIKPTLSKIKNTEQIEFNENGRPNGVVEWCKKDYVGVSLERLLNSLKEDMRKEKLIDSDKKDIYCIRIEIDSGEYVYFLNRIPQLRKFEKGIWGRLVDSTFKKTTNAFIGIEPNFDLIIYQEEILVVNNVAMQRIFDLRTKYIENANSVLSSFEDSEKIEGFEQFKMDSIEDGNVVKRVSRLMEKPERMTRFIDNFDKVEQIIIEFDLNIELNAEKTKIKYTDKKQLNDIVKLLNDAYYKTVLSGEKGVDELR

SEQ ID NO: 93918 - protein, 176 aa, Gluconobacter oxydans H24
MFGRLAKFLLIASALAPVGLVYAWIVWRNQQHGIAIGIVAACAMLVLICVYLLRQARTSLERFPLNITSVEPADRENIAFMLLYLSPLFTSELGQININLLIPTLLIFTLLTATGYNYHFNPLLGLAGWHFYKVESAEGVTYVLITRKQLRNTSTINHVGQLTEYILIDLEGANAC

SEQ ID NO: 93919 - protein, 278 aa, Gluconobacter oxydans H24
MIVKRIKITAAVQNQLEGIFIQQEQMFVGGVTEEVPFDGGWSPDPHEHLVAQVTDEAAVIFAAAQGNIVAMPEVDPANFEAENIRALGVLVQRPTGPRLLLQEFSARQMLERRFSLILDGNTFNRLTQPAFAIGASLAGFVEGDKIKFQKFSRIKLIFNLTSLYQEATDTEVEGFCGLECINVGDIGKFKNLADQKMRKLINAITKRGTLNDFTPAQIQVAAADENFQIAVADGKIIIPSMKAEAKALLHFLDNGLYRGPLGGEIFITNSKRALTPMP

SEQ ID NO: 93920 - protein, 196 aa, Alcaligenes sp. HPC1271
MESQERQLQFHQAVMKFELYIISLWLLFVLMIIVKVDIPTCFGADCHYVGTLQLARTNVLPIISLIFIGLVILCYSRFKYRTQGNVGLPTIAKKVEDLSYEHLTFLTTYIVPLICFNLDNIRYIVALFVLLFVIGQIYVKTDKFYANPTLAILGFRLYKLEVDGVSKVMITTQRISELDKIVFTTIDEKFVSGRKA

SEQ ID NO: 93921 - protein, 323 aa, Alcaligenes sp. HPC1271
MSIDALRQTAQNLANDPQTVGIMFFTLKENNTFVPRRVELSSDAQLALTAQLKLEILEFFKTNYALRDLTAIDLRQDAVFRYNLPSYPSQLEVLKRTLDKPATINDFNHVNDSVTELKAIVAVLGNGNESLAIYKHHYPTNTYRRNGFNLLRAGIAQNRFEKLDQDIIRMGHTIDFIYDGVDVFVTNFKILEKFFGFKEAVKADATIKLATLTARNIVQDAAILKDRITVQEDLTFARKVIRAISHSRVLDTVTNGQIIQFIKQHQSLSKKIKVNAADTHIILDTKVSQNFFMKLLNDDYLKSELTKFEYDADSKDLVEATGL

SEQ ID NO: 93922 - protein, 176 aa, Paenibacillus popilliae ATCC 14706
MITVLYRIGLYVSSFFPLYILIVIGNYNYFTSWLQFWDLIKFKDISTSLFWLIIFILIVISIISLLCITNRSQNEKHQFTGVSKTEDSLLSYVVTYLIPLLSIEITKVNSLLVNAGLFLLLGFIYVRNNFIYLNPLFLFFGYNIFKTANEEVLISNYDIYDLKNMENEKLKCRVLG

SEQ ID NO: 93923 - protein, 305 aa, Paenibacillus popilliae ATCC 14706
MDINGIITMLDRVRLENVDLRLYFTRKQSNDTYISYSPTISTDLQADLISIVTNALKEVRETEQRPFNPIGTVDGCVEYCDVKEIMNFQEILNSIREDVVIRRRIATEEIRKLTFYCLKIVLEDQDELMIFRRVTKFNRLTKGLIGRFIEGDFEKLNPDLLGIDGNVDVVIFRDEMLVLNHISLERIFSIKDQYIEKASYTLEIVGRSRRIQNFEQFREDCLADGRIIRALTKILDDEERIHKCFINFENVLEVVDIFELDIKFEEGNTVLVYEEKSQLLDITRLIRDSFYRSLINNREGIDEGV

SEQ ID NO: 93924 - protein, 179 aa, Aggregatibacter actinomycetemcomitans Y4
MLFISAYAPLMLIILIKQVDFNMPYYLNSPIVSLILLIVAVSSSVITILTAKSVRAGLMVTVSKASNKSGDMFGYTIPYMLSFMRIDLSEWQTITAIILFLSVLFIMAYRTQTVFINPILAISGYMLIDCTFKRQEKEIQAMVITREPISAGDSVCLDRLSHYLYIRSQSDYQNKEESV

SEQ ID NO: 93925 - protein, 313 aa, Aggregatibacter actinomycetemcomitans Y4; identical to SEQ ID NO: 93761

SEQ ID NO: 93926 - protein, 172 aa, Escherichia coli KTE138
MLNGFARYALTASSVAPVCLTLAFLAYINDNYKILVSSILLAVVSVVFCVFIIKQAQKYNPVTLKNLESASPADKEITNYFLTYLFPLISGPTTFMDWRLALFFYLSLFFYIKHSSSYSFNPILSIIFGFKFYEAEDDTGVSFVLLSTKPLTNAKIKGLRVKKLTEHTYMIV

SEQ ID NO: 93927 - protein, 297 aa, Escherichia coli KTE138
MELFAITDSEIPTRIIKIDIDAPAQTVVENLFRTQRSEFINEDIEEIEFCASYNVQDGEIFSINPFDDEIGIINAIERPDAVPVWDPDDVSVHYFKALFTGEPASNGNPTQVWLQCFDRRQIINNEKSFFQVVTQPGNRFSVSTRPGFSLSDRLTAILVGDKLLFKSFFMLRRFFNMEEYFNEATREDLDNFIGNDIFHVENAEDFMMFADSAIKKKVSLIISSGILNDQPIENLIECAQKIGYQLGITNVNGDNKITMPNSKREVKQLLYFLDQGYFNSIITNELMLTNSKRPIRI

SEQ ID NO: 93928 - protein, 193 aa, Rhodopirellula baltica SWK14
MNSVFKKVNLYVLSLGLLFLFIVIITFEPVTTSSGLRTLVGWSDLATANYVSLIAAFGMAYCGFAYVLFRHQLKGATELPFEVTRIESVEYEHLTFLATYVVPLISFDFGSGRQLLVLGLLLIAMGAIYVKTDLFYANPSLALLGFRIYRVDGNFKTGDRHGIILICRSKLKVGQKASYIKLDEKIYFAKGST

SEQ ID NO: 93929 - protein, 320 aa, Rhodopirellula baltica SWK14
MNIDELKENLRPYLATDDMGISVYAVIKGAEEEGPKRLDIEQDSHDCLLQMFATRIRSQIVDRTEVSVMNLSDSDERQNVIYEYDLEVPQELQALQAVTQTDDTGLLSLNDESLSQIKAIVVEIGNNEGQLVLYKTMAPINVFGRDKIFLKKHESRLARIDDEFLRISDGFQMLHVDGTLMVLDLKTLESKFGFHDVVKREAETGLQTIEDLGLLENPETLRELINDVKFARKLTKVARSSPVLQQMISNDRIIEFCKNYPTLKNIKFNSAEDKILLDTQKSKDLFIKLLMDDYLVSQLTSRHYESLAKDVAEPAAESIV

SEQ ID NO: 93930 - protein, 207 aa, Leptospira terpstrae serovar Hualin str. LT 11-33 = ATCC 700639
MENQTKLTKNARFSLFIVSYFPLFLILTIRQLYDYSIYIHWAGLNLEGFFIYLQHFGAITIFSVLTLYGFTGLIFLLKNMKRRVTFSGDTAIITDIENKNNESLSYLFTYLLPFLFQDLSNPISLFSLLILLIVTFFIYTNSSMLLINPTLSLKYTIFQVEFKYLNSNKTNKGMIISEQSHLNEDDIIKIKPIGSRLYYSIITGTNQ

SEQ ID NO: 93931 - protein, 331 aa, Leptospira terpstrae serovar Hualin str. LT 11-33 = ATCC 700639
MKKVKELDSIIDILSSQNLNVTFYFIQRKPKKGLKEKTIDKYDYFPIKADLSNEINLFFKDSLLESLKNLSNNGKYNIINYQIINDDLSGIISKLKEDKNLSFHKTIELLMNKKTEHMKSLSDVKKNLWAYAIEFNDNKNSFLCFRKSTSSKIATDDKNLREKLSSYWDSADGELKISPNETVSFDSRIDCLFFGDTYYILNKSNFEILVGMENQFLEFAKEVIETLTNTGLIEGIALLEKEIKENKNILKTVSNIGKKGTQTTLDSHEITKMKQVLQQMEQKELKLSPSNKIVLENTDDVNSFLKLLNDYYKQGLVTGKIYGSHSGEIIP

SEQ ID NO: 93932 - protein, 193 aa, Aggregatibacter actinomycetemcomitans serotype a str. A160; identical to SEQ ID NO: 93842

SEQ ID NO: 93933 - protein, 313 aa, Aggregatibacter actinomycetemcomitans serotype a str. A160; identical to SEQ ID NO: 93847

SEQ ID NO: 93934 - protein, 99 aa, Escherichia coli Nissle 1917
MPLVFTDLSKPSNIVNFLFVLIIVGFLHIKTKRIHCNPTLSLFNVSAYKITYSVVANGREKTQDGELIVLSKDLIKENDFIRVINHDDYLTFAKKIIEE

SEQ ID NO: 93935 - protein, 380 aa, Escherichia coli Nissle 1917
MSDDALDLDALEHNEEKAQELLELYKHFDCDINDVTLHTYFNFKNKGKAGAKDSFSYKIAILKNDSELKQSIIDNVIKKTISDLENRVVIVSDVNTLSDRTNTISFLNDAEQYDNEQMKFLTGIVFDAGFGGDGNENIPIVDFDSVDLISKVDSIIFVLSKNNDDNCITIYKKQYPVQNLSRKKNNFYGFSKKELSRVDQDMISIDGKASLVFAGDTVFIYDQNVFERFFGYKAWIKNAATDFVNNMSTRFKGFVDLSKFIERVNKDSHDADAFSRKLAKAYARSETKQTLQTITNEHLKSVLDENGYLAGVLKYKKGDATICIASHNQQDTFIAMVSEGVLRSLITGIDYLSLGSKRKISSAASNTTTSTTSDSSSAAV

SEQ ID NO: 93936 - protein, 205 aa, Haloferax larsenii JCM 13917
MRKFRAPVKFILFLSSYVPLFFIMALKFGKVPPLLIAGYKIPLINIPYIDFRLYISYLSIGLLVLCVLFTALLYRMVTVHSGRATTQEPVDKYQKRSELLSMYLLVYVFVFAGLDFTTLLDLGIFLVFFGILGVLQINSEILHVNPMLGLRGYQVYEVTSDEQVLLVISKSSIEEKMILPETKEADNPRKKIEVVSLGRTTYLAP

SEQ ID NO: 93937 - protein, 323 aa, Haloferax larsenii JCM 13917
MSGKLNPAEKLKEAREFAVGRTEAEFLLVRKQGESPDVGKLQLGRLVQQEIAQTVSDALTEQINNLRDGRTRARPLDVANTISEESVIQCVRIENLPDSELFEILNSRDNDGTTTYSEEPEPNFQLIRISEPDGKVLIGVQNYSNAKLVDTTNELTLWYQNEEYERFQGDLLVIRPNLNAICYDGWVFIITPKSFESMFDMREEYRKRAEEAIEAFEDAGITFADRETTTGWMLSHINMLRGMYEIYDNGIHEQATPDKIEAMIQKYNLDTRFSLDYARRNGQIELGVDEYQHTWKLIKLLAAKYAEDDIMGEQWEIDSGQRL

SEQ ID NO: 93938 - protein, 204 aa, Edwardsiella tarda ATCC 15947 = NBRC 105688
MRVNKLRLGARFSLFIVSYLPLFFIMCFIQLYTHKDYLHWGGVSLDSITVFVKYFGAVSILILFSLFGIIGLAIFLKNIKRRCKISGRRVQIIDIENKNNESISYLFTYVIPFVFQDLSTLSNVIPIGILLMVTFLIYINSSMILINPTISMSYTLYQVSYQDVECGKKRSGMILTKSKYLEEGDFIDIEDVGPKLFYAELLEE

SEQ ID NO: 93939 - protein, 339 aa, Edwardsiella tarda ATCC 15947 = NBRC 105688
MLNLEDLLEYAENLKDDDDVKISLYFVTRHLKVGVSKAAKVTDKYDFYIIKAPIAQDVANFFKQTLSNQIISHASKDDVEMKKYTVIDDDIDNKIYAYAMNNAISFSKVISEDIKSDKIRTITSLTEISDNLWAYCIKVQKNLELTYSFRKISKGKITTSDPQSLRQRICAQFDKSDKELRVFDGNAINFDDKIDCIYINGQFYVFHKKSFESIVGLDDEFIESSQKTLNIIKGFNLVEGLDIIEQAILYKPSFRKTLAHIAEKGNHASLSKKEVTSMNDVLRMFSNEQFTIKNEKIVIENEKQARNFLRLLNDYYKQGMTTKKYYGTESGSLVSPINK

SEQ ID NO: 93940 - protein, 199 aa, Citrobacter freundii GTC 09479
MKRKSTFNKMGLYILSLMLLFVFIIILSAKIPFCYGSSCHFIGFYQLASSNIISIICVIFIGIAFYFYRRFKGLTKVNNADCVTITACQSESYESLTFLATYIVPFMGFSFDDPQKNLAYFLLIVVIGLIFIKTDKYYANPTLALFGYKLYRVNISYSGSSEVKNVIAISMDVLTVGDQVFYSFFDDYVFIARKKDESR

SEQ ID NO: 93941 - protein, 319 aa, Citrobacter freundii GTC 09479
MNPDDLKVEINSIFENYSGIRVIFIVKNEEDYSLKLSKIDNKAFPKIIEGFKLSLTQDIIENEDLTIPQLSNFDDRKNALFLFDYEQKPLEFDFITSAIEIPPNSQDFYNYEDKFKNIKGIIIQIRGNNKCLSLYKNKTPITVFEQSRKVFNLVPDPDGFLKELPEQVFRLDFNYDLILLDDNFIIKNLTTLERTMKFHEVIQAQSVIALKALKESNLIEDLSHLEKSSSEMSFSRKLAKISKHSPVLGIIDVPVIIEYVKQHSFLSTVMIVSDDGTKLIVKTKRSQKHFIKLLSDDYLESPLTKILYDSLAKDELKAN

SEQ ID NO: 93942 - protein, 156 aa, Gluconobacter thailandicus NBRC 3255
MYAWIVWRNQQHAIAIGIVAACAMLVLICVYLLRQARTSLERFPLNITSVEPADRENIAFMLLYLSPLFTSELGQININLLIPTLLIFTLLTATGYNYHFNPLLGLAGWHFYKVESSEGVTYVLITRKQLRNTSTINHVGQLTEYILIDLEDANAC

SEQ ID NO: 93943 - protein, 278 aa, Gluconobacter thailandicus NBRC 3255
MIVKRIKVTAAVQNQLEGIFIQQEQMFVGGVTDEVPFDGGWSPDPHEHLVAQVTDEAAAIFAAAQGNIVAMPEVDPANFEAENIRALGVLVQRPSGPRLLLQEFSARQMLERRFSLILDGNTFNRLVQPAFAIGASLAGFVEDDKIKFQKFSRIKLIFNLTSLYQEATDTEVEGFCGLECISVGDIGKFKNLADQKMRKLINAITKRGTLNNFTPAQIQVAAADENFQIAVADGKIIIPSMKAEAKALLHFLDNGLYRGPLGGEIFITNSKRALTPTP

SEQ ID NO: 93944 - protein, 194 aa, Rhodopirellula europaea SH398
MNSNFRKINLYVLSLGLLFLFIVIITFEPTIAFSELAKLQGWSRLVKANYVSMIAIGGIAYCGFAYVLFCHQLKGATELPFEITKVESVEYEHLTFLATYVVPLISFDFGSGRQLVVLGLLLIAMGAIYVKTDLFYANPSLALLGFRIYRIDGNFKMGDRTGLIVICRGKLTVGQKASYIKLDEKIYFAKGKKK

SEQ ID NO: 93945 - protein, 321 aa, Rhodopirellula europaea SH398
MNIDELKDALRPYISIEDLGITVYAVIKGAEEDGPKRLDIEQDSHDCLLQMFAKRIRSQIVDRTEVSVMNLSDSDERQNVIYEYDLEIPQELQALQSVTLTDDTALLSLNDESLSQIKAIVVEIGNNEGQLVLYKTMAPINVFGRDKIFLKKHESRLARIDDEFLRISDGFQMLHVNGTLMVLDLKTLESKFGFHDVVKREAETGLQTIEEMGLLENPETLRELIDDVKFARKLTKVARSSPVLQQMISNDRIIAFCKNYPTLKSIKFNNDEDKILLDTQKSKDLFIKLLMDDYLVSQLTSRHYESLAKDVADADATAATA

SEQ ID NO: 93946 - protein, 194 aa, Xanthomonas axonopodis Xac29-1
MQFQFWSAVLLFLGSYLPLAVILMVQDIATKYWSAPLCGWKGQWNCQFQILAHSWLAWGTVAVTFGALLLMVVALRSVRLPHRVHVQEVKAIPNDLINYVLPYVVSFMGLSYADPQKLGGFLVFWVVLFLITYRSGQILMNPLLIVLGWKLYEVKVGLGQSGAIRMARVLKKGPLVPSIQMAEEIQDVYLMRDP

SEQ ID NO: 93947 - protein, 309 aa, Xanthomonas axonopodis Xac29-1; identical to SEQ ID NO: 93687

SEQ ID NO: 93948 - protein, 215 aa, Escherichia coli KTE51
MKIRMYLLSMLFLFIPITIYFSGIDNVWSVLDKAMSSCSGADGKFQCVLDYSNSRLTFSVLRSVICGALILTCSYTYIWYRWVLKNLDSGAVSRKLKVVSCKKESGEYLSFLSTYIMPLVFTDLSKPSNVVNFLFVLIIVGFLHIKTKRIHCNPTLSLFNVSAYKITYSVVANGREKTQDGELIVLSKDLIKENDFIRVINHDDYLTFAKKIIEE

SEQ ID NO: 93949 - protein, 314 aa, Escherichia coli KTE51
MSDDALDLDALEHNEEKAQELLELYKHFDCDINDVTLHTYFNFKNKGKAGAKDSFSYKIAILKNDSELKQSIIDNVIKKTISDLENRVVIVSDVNTLSDRTNTISFLNDAEQYDNEQMKFLTGIVFDAGFGGDGNENIPIVDFDSVDLISKVDSIIFVLSKNNDDNCITIYKKQYPVQNLSRKKNNFYGFSKKELSRVDQDMISIDGKASLVFAGDTVFIYDQNVFERFFGYKAWIKNAATDFVNNMSTRFKGFVDLSKFIERVNKDSHDADAFSRKLAKAYARSETKQTLQTITNEHLKSVLDENGYLAGVLK

SEQ ID NO: 93950 - protein, 105 aa, Escherichia coli KTE75
MLNKLAKYLLTASSVAPVFFTLAFLSCISKHYKFMFAYLSLCAIILLLCFLIVKHSIKYNSVTSKKLTTASPADKEITNYFLTYLFPLISGPDPLWILGLLLFLL

SEQ ID NO: 93951 - protein, 267 aa, Escherichia coli KTE75
MELFAITDNTVGTRIVRIVTDRPTQNVVTQLFSEQKTFFEERYTEGVEFSGGYITSGDEFFVIPDFDDVIAVLDAINNPTSIPPWEPEEISAFNIIALFSGYPEEDGKPVTALIQSFDKRQVIDNRRTILQKMFQASNTFCQSTEHGIVIDNKLSAILAGTELKFKSFHMLRRIFDVDAYFREATNEELTSFSSHEKFSVVPGFDLTTIADSVIRKKVSLINKSRILEDYSVTELRISASEIGVALEAEKIGEIEKIKMPQIRKDVN

SEQ ID NO: 93952 - protein, 204 aa, Escherichia coli KTE9; identical to SEQ ID NO: 93768

SEQ ID NO: 93953 - protein, 340 aa, Escherichia coli KTE9
MLKLEELLEYAEQLKDDDAAKISLYFITRHLKAGMSRTARVVDKFDFKIIKAPIAPDIAKFFKYTLSNQIISHASKDDIVMKKYTVIDDDIDNKIYAYAMNNAISFSKVINNDIKNDKPVVLTSLAEVQNDLWAYCIKVQKGADVTYSFRKISRGKVTTNEPQNMTQRVFALFDKTDKELRSFDGSAVNFDDKIDCIYIKDQFYVFHKKSFEAIVGLEVEFTEAAQKTLNTIKELDLIEGLDVIEQAILHKPSLRKILTHIAEKGNHTALEKNDVQAMNDVLKMFQNEEFKTNEHGKLVIEDERQGRNFLKLLNDYYKQGMTTKKYYGTDSGNVINPIKA

SEQ ID NO: 93954 - protein, 197 aa, Escherichia coli KTE101
MDSRPYLKTVLYILSLWLLFLSLLIMSYDKVLIKNVWDYIFTENFTFSISSLKVRNIVFIVSLIFIFIGAIILIVLANSFGSGWSVACTVSDISNENHEHLEFLTTYIMPLVFTDVDSKRTVLNLGLMIFVIGAIYVKTNRFYSNPSLAILGFRIYKANVHDRGVKKCTVICRSVLKSTDNIKYIKIDDETYLAKIV

SEQ ID NO: 93955 - protein, 323 aa, Escherichia coli KTE101
MFTNIENILKSKRISGEAFFVADVQGTIDIFKVNLEPDAEKDLTTSFSKSLINIIIEPNRGKVAVPLVSTLLERDKQVFEYDHLTINHLPIEFTKMNNVLNFGVNGNATQFDFATQSLTSVKAVIYHLCDGNGNSVVIYQHKYPVSLHKKTKKSFLSLNGRTLDKITHDSIDINDTIDFFFFQNKYYALNIKLLERMYGLESVIDNLANNSTPLIINLGIVNTQGMPVPLDIFKDMYKDRAFMRRLAMVSKGNLVKTGVSVPQIQQVMQKFPVFQRNIDLTGGLINLNTKDQKRYFIRLLNNEASFAALDNSPFLAVEKDSAA

SEQ ID NO: 93956 - protein, 172 aa, Escherichia coli KTE165; identical to SEQ ID NO: 93790

SEQ ID NO: 93957 - protein, 294 aa, Escherichia coli KTE165; identical to SEQ ID NO: 93791

SEQ ID NO: 93958 - protein, 93 aa, Escherichia coli BCE019_MS-13
MGFSFDDPQKNLAYFLLIVVIGLIFIKTDKYYANPTLALFGYKLYRVNISYSGSSEVKNVIAISMDVLTVGDQVFYSFFDDYVFIARKKHESR

SEQ ID NO: 93959 - protein, 319 aa, Escherichia coli BCE019_MS-13; identical to SEQ ID NO: 93941

SEQ ID NO: 93960 - protein, 90 aa, Escherichia coli 2780750
MGFSFEDMQKNIAYLLLVVVIGIIFIKTDKYYANPTLALFGFKLYRVNILHPGSGETKNLIAISNDVLKVDDNVYYSFFDEFVFIARKKI

SEQ ID NO: 93961 - protein, 315 aa, Escherichia coli 2780750
MTTQQLKEKISKIIDNFSGIRVVFTTTANELKLSRIEGSALNSIAEGFIDKIKEDIINNEDLTSPLLSNFDDRKNALFKFDYEQYPEEFNKITQAIAIPPNSQDYYNPLNKFTDVKGIIILISGDNKCLALYKNKTNLAVLRNSRKMFNLVPDPDGYLKQLPNEILRLDFNYDLLSIGEDFYIKNHKTLETQMKFHQVIEAQAVIALNSLRDSLLIEDISGLEKSSREISFARKLAKISKHSPVLGKIDTKTIIDYVSQHKYLSAILQINEAGNKLLIKTKTSQKHFIKLMSDDYLQSDLTKIIYMSIAKDRLDE

SEQ ID NO: 93962 - protein, 109 aa, Escherichia coli P0298942.1; identical to SEQ ID NO: 93876

SEQ ID NO: 93963 - protein, 335 aa, Escherichia coli P0298942.1; identical to SEQ ID NO: 93879

SEQ ID NO: 93964 - protein, 93 aa, Escherichia coli 2730450; identical to SEQ ID NO: 93958

SEQ ID NO: 93965 - protein, 319 aa, Escherichia coli 2730450; identical to SEQ ID NO: 93941

SEQ ID NO: 93966 - protein, 93 aa, Escherichia coli BCE030_MS-09; identical to SEQ ID NO: 93958

SEQ ID NO: 93967 - protein, 319 aa, Escherichia coli BCE030_MS-09; identical to SEQ ID NO: 93941

SEQ ID NO: 93968 - protein, 93 aa, Escherichia coli BCE032_MS-12; identical to SEQ ID NO: 93958

SEQ ID NO: 93969 - protein, 319 aa, Escherichia coli BCE032_MS-12; identical to SEQ ID NO: 93941

SEQ ID NO: 93970 - protein, 109 aa, Escherichia coli 2862600; identical to SEQ ID NO: 93876

SEQ ID NO: 93971 - protein, 335 aa, Escherichia coli 2862600; identical to SEQ ID NO: 93879

SEQ ID NO: 93972 - protein, 211 aa, Escherichia coli P0298942.10
MTSTNSNSASCDNIKFKYYLYFLSLWILFLSVSIMSFDWVFIERLVRFILLKYTFEDVFNNFNKLKVRNFVFIFCISMVFSGISSVVYLFSSLSRGWGSTHKVSNVKNQTHEHLEFLTTYVMPLVFTDVNSKRTVINLLLMICFIGVIYVRTNRFYANPSLAILGFRLYKCVIKNDPSGKEYTVICRGKMSNDCQVKIKKIDDDTLIAKLI

SEQ ID NO: 93973 - protein, 335 aa, Escherichia coli P0298942.10; identical to SEQ ID NO: 93879

SEQ ID NO: 93974 - protein, 93 aa, Escherichia coli BCE007_MS-11; identical to SEQ ID NO: 93958

SEQ ID NO: 93975 - protein, 319 aa, Escherichia coli BCE007_MS-11; identical to SEQ ID NO: 93941

SEQ ID NO: 93976 - protein, 93 aa, Escherichia coli BCE006_MS-23; identical to SEQ ID NO: 93958

SEQ ID NO: 93977 - protein, 319 aa, Escherichia coli BCE006_MS-23; identical to SEQ ID NO: 93941

SEQ ID NO: 93978 - protein, 109 aa, Escherichia coli 2733950; identical to SEQ ID NO: 93876

SEQ ID NO: 93979 - protein, 335 aa, Escherichia coli 2733950; identical to SEQ ID NO: 93879

SEQ ID NO: 93980 - protein, 109 aa, Escherichia coli P0298942.4; identical to SEQ ID NO: 93876

SEQ ID NO: 93981 - protein, 335 aa, Escherichia coli P0298942.4; identical to SEQ ID NO: 93879

SEQ ID NO: 93982 - protein, 109 aa, Escherichia coli P0298942.15; identical to SEQ ID NO: 93876

SEQ ID NO: 93983 - protein, 318 aa, Escherichia coli P0298942.15
MFFIINDNDNYIYRRVILHDENTEPLITENFKKSITDEIIKRISINDNGDAIIDNITDMNYEHKGVYYFDIASEDKSTIIKIIEEISSLTVADNPIDFKFNDVNLDNIIGLVYHMSDGDKNIFLYQHRYPNFLHKKSRLSFLGEGDVLVPIPYDMINISKVIDFFVFDGISYAINIKLLEERYGLTQVIDNMVSEVTPKIIEMEIVNKSVLAEPEKIFDDMKDDRGFMRKLARVLKNGILELNIDVNIVNEIKTSFPTIGRNIDIINDDNGMQYIKLTSKARKKAFIRLLNDEAVRSVLTQKPSIAQNHKPEKNITPT

SEQ ID NO: 93984 - protein, 177 aa, Escherichia coli P0298942.6
MSFDWVFIERLVRFILLKYTFEDVFNNFNKLKVRNFVFIFCISMVFSGISSVVYLFSSLSRGWGSTHKVSNVKNQTHEHLEFLTTYVMPLVFTDVNSKRTVINLLLMICFIGVIYVRTNRFYANPSLAILGFRLYKCVIKNDPSGKEYTVICRGKMSNDCQVKIKKIDDDTLIAKLI

SEQ ID NO: 93985 - protein, 335 aa, Escherichia coli P0298942.6; identical to SEQ ID NO: 93879

SEQ ID NO: 93986 - protein, 109 aa, Escherichia coli P0298942.3; identical to SEQ ID NO: 93876

SEQ ID NO: 93987 - protein, 335 aa, Escherichia coli P0298942.3; identical to SEQ ID NO: 93879

SEQ ID NO: 93988 - protein, 109 aa, Escherichia coli P0298942.7; identical to SEQ ID NO: 93876

SEQ ID NO: 93989 - protein, 335 aa, Escherichia coli P0298942.7; identical to SEQ ID NO: 93879

SEQ ID NO: 93990 - protein, 109 aa, Escherichia coli P0298942.11; identical to SEQ ID NO: 93876

SEQ ID NO: 93991 - protein, 335 aa, Escherichia coli P0298942.11; identical to SEQ ID NO: 93879

SEQ ID NO: 93992 - protein, 109 aa, Escherichia coli P0298942.14; identical to SEQ ID NO: 93876

SEQ ID NO: 93993 - protein, 335 aa, Escherichia coli P0298942.14; identical to SEQ ID NO: 93879

SEQ ID NO: 93994 - protein, 214 aa, Eubacterium plexicaudatum ASF492
MQTDNLSLKRSLVLQSFAPLFLLLTIKHLDINLYLKLIYKFIDIWSKTGIKAFAIAINHTSFGGFVVSAISIIWLMITIMIALGFNGIQKAGFKSAGEQIIIEDSPNDGGATFLVTYVLPLLTDDVESIRGLIVFLTMLIMVVLLLTRSNTFYQNPILAAMKYRTFSFKFLNPSNDITNPERVYIGITYKKPIVEEAVIKRKYISDGVFVIYND

SEQ ID NO: 93995 - protein, 330 aa, Eubacterium plexicaudatum ASF492
MSEAGLNEEQIRTKIKEFCDNPVQSGLEAYVVKKDSPKLKRMSLSEEENEEGKNFRTVLKEMFFEILEEKFLSQESEYADGHKLADNQHKILIFEQGDSFHPFTYISDIDEFDEFVPEDLIDASGLMFCIRKGTDVLWIYQHLWSIMVPNKKKTNPMARIMRFENKIVFEEQRENLLTIAKKIDIIVMNNHLITSNTTLLQKYFGFQDYVYQTAQQTIQCIVQKNLVENTEKLTEYISRGKPKYARKMMRIGLSKVFDLTQEQLINKVNTLPRWQGKFNFNQDSNQIVLNTFSEVESLIDLFDERYTRSDVTDTEYDTDVKTVAEPTQID

SEQ ID NO: 93996 - protein, 185 aa, Acinetobacter ursingii ANC 3649
MSTQQNESLGFIRVMMVLSSFSPLFILWALRGNKEVSDLYLIPICALFVIIPNLFLWQRITVAKKKNDKRTIKVGTADDHKDHILVYLFATLLPFYSVSIDSIRDVWTTLVALAFVIFLFLHLNLHYMNIVFALKGYRIFTICPPEDNNPLSGKTPQVLITKRSIVLKDDEIMAYRLSNTVFLEI

SEQ ID NO: 93997 - protein, 301 aa, Acinetobacter ursingii ANC 3649
MVIDFDFDRVTNIEFGVGRENEDQSQQFFEAVPVDEGVQKALVEMVQTTIVIMRKNNDKPELYQPSEKHAGIEYLYLATSDQLAQTMKGLHEAANLTINSNVLNDPSEIFCYFARFTDQSGKKLTALRRAIQFKGVLKNQLIRFLDDTLKIVEEKVFKLDADFDLLIDNSNIHIIRPSAFEFAGKLQEAILQAVPMNIASIAADLTYVDFTSLQSYAEHRPRAARYIASIKSQAETKNINKDRLKLLCQHTGVSLEDQNGKIIVKEGYELAFLEVLDRRRYRLELIEGQAENFKASSRSKL

SEQ ID NO: 93998 - protein, 71 aa, Acinetobacter sp. NIPH 713
MGIIYIKTDLFYANPSLALLGFHIYKADGEFKASIGNKENIILITREKLVADTRVKYIRLDDRIFYVQKVN

SEQ ID NO: 93999 - protein, 316 aa, Acinetobacter sp. NIPH 713
MLINELKESLNEFVESPNNFVACVYGVLQDGENFSIKKLDIAATDQPAIRDIYLKSTKELLIEKSDLSLIKLSSCDDRREAIYEYDLALPPNIAFLGGLNLDDTLPKFNFNTDDLSKIKGLIIEIGNESDTFMIYKSFPLIHLFGRGSLYLGLMKEEERFKRIDQTFLRLTTGFQLLIYQSTLYVIDLSFLEKSTSFKGIIKAEAEKGIEAIESLGILDSTEPLKDMIEDLAFSRKLTKVINDSPVIKAGITNEQIIQFIQTHVKLKKQIKISDDGTKIILTSKVSKNEFLRVLLDDHLYSKLTDIPYVAKAKDVA

SEQ ID NO: 94000 - protein, 191 aa, Acinetobacter sp. NIPH 1847
MINKLKLYFISLALLFIFIIVVTIDIPFCFQDGCSFIGFKLLFFKNWFSLICLVCFFISLFFWFDFKFKLKGSTSNPFKAKKVENVSFEHLTFLATYIVPLISFNFDSDKFKLLFTLLIFVIGIIYLKTNLFYANPSLALMGYSIYKVDADFRDGAKEGIIVLSLNKIEKDSLVTYIKLDENVYFGRVLNG

SEQ ID NO: 94001 - protein, 315 aa, Acinetobacter sp. NIPH 1847
MDRETLAAYVDAIINDITSTASVYAIISVNNNYEIRRVDVEANLQNQIKKLFSESLQGSILFNEDTSIKKLTECDSRRNVICMVDTDLGEQFSCINQLDGNHGDDLLHFKPNEELNSLKGLIIDIGNQQSQLLIYKHIYPLEILKPTRLAGMFTTNRLEKVNKDLLTISPSYQMIRVESESYIFDIPFVERNAKFQMIVKSKATQACQIMRNVAWIHNPTAMDELVDDISFARKLSRITAQSPVITKAIPSVNIIEFCKNFPSIKGKIRFNDDETKILLDTKVSKNLVIKIFLDDMLKSELTESHYESLAKDNVD

SEQ ID NO: 94002 - protein, 185 aa, Acinetobacter sp. CIP 51.11
MSIQQNESLGFIRVMMVLSSFSPLFILWALRGNQEVSDLYLIPFCVLFVIVPNLFLWRRINIAKKQNDKRIIKVGTADDHKDHILVYLFATLLPFYSVGIESLRDIGTTLVALIFVIFLFLHLNLHYMNILFAMKGYRIFTICPPEDNNSISGKIPQVLITKRAIVLNGDEIEAYRLSNTVYLEI

SEQ ID NO: 94003 - protein, 301 aa, Acinetobacter sp. CIP 51.11
MFVDFDFDNIKNIEFGVGRESEDQNQQFFEAIPVDVSVQKALVEMAKATVEIMNKSSPSPDLYQPSEKHAGIEYLYLPISDQMAQTMKDLHEANNLDMNAKVLKSPTEVFCYFARFIDKSGKKLTALRRAIQFKGILKNKLISLCDDTLKIVEEKVFKLDADFDFLIDNSNIHIIRPSAFEFAGKLQEAILQAVPTNISSIAADLGYVDFTSIRAYAEKRPRAARYIASIKSQAETKNIDKDRLKLLCEHTAVSLNIQNEKIFVNEGHELGFLEVLDRRRYRLELIDGQVENFKASSRSKL

SEQ ID NO: 94004 - protein, 212 aa, Clostridium clostridioforme 90A7
MGEQNLKLKRKLVIQSFLPLFILIFIRYLDYRMISSICHFIRELMQRNFSVMNRIWDHPYLGPFIAAFISLVCSLYGITAMWQFKSMQMSGFVDAGEEIVIEEEITDSGITFFMTFVLPLLLDDVETLRGFIIFTGILGLVIRLMWTTHLYYQNPILTLLGYRIYKFRFINPVMDGCRDKTMIAVCRTGIEEKKIVKWKYISDDVCLMYNKN

SEQ ID NO: 94005 - protein, 335 aa, Clostridium clostridioforme 90A7
MENKREHSTNHAIPKTSKEIIVNSLTELFADDEFGFDMFIMMKTVEPSMKHFAFYEGPTGREHDFKLKVQNSIVKSIRDLFLDEEAEYAMAEEAGGNQNIFYIIKQNDDYKPFELLNTPEKQMGPFFMDDRDKADAILFRFRRGVHSIWAYQYILPATIPNKKNQHFFARILDTEQTDCFVEMPEQLFVITRKVDLLIMDDKIITKDIGLMQRHFGFNDFIKASAKKAVSDISDIRLVTNCEKLTAYIERNQTKYSRKMMRIKHYHVVEKTAEELIQIINTVPRWQGVFDIRDGQIYLRTFRDVENLIDLFDERYTVSLVTGDEFDTDVKRLAAP

SEQ ID NO: 94006 - protein, 212 aa, Clostridium bolteae 90B8
MGEQNLILKRKLVIQSFLPLFIFIFIRYFDYRMISSICHFIRELMQRNFSVMNRIWDHPYLGPFIAAFISLACSLYGITAMWQFKSMQMSGFVDAGEEIVIEEEITDSGITFFMTFVLPLLLDDVETLRGFIIFTGILGLVIRLMWTTHLYYQNPILTLLGYRIYKFRFLNPVMDGCRDKTMIAVCRTGIAEKKIVKWKYISDDVCLMYNKN

SEQ ID NO: 94007 - protein, 342 aa, Clostridium bolteae 90B8
MENKREHSTNHATPKTPKEIIVNSLTELFADDEFGFDMFIMMKTGDPPMKHFAFYEGPTGREHDFKLKVQNSIVKSIRDLFLDEEAEYAMAEQAGGNQNIFYIIKQNDDYKPFELLNTPEKQMGPFFMDDRDKADAILFRFRRGVHSIWAYQYILPATIPNKKNQHFFARILDTEQTDCFVEMPEQLFVITRKVDLLVMDDKIITKDIGLMQRHFGFNDFIKASAKKAVSDISDIRLVTNCEKLTAYIERNQTKYSRKMMRIKHYHVVEKTAEELIQIINTVPRWQVVFDIRDGQIYLRTFRDVENLIDLFDERYTVSLVTGDEFDTDVKRLAAPGGMGGED

SEQ ID NO: 94008 - protein, 212 aa, Clostridium bolteae 90B7
MGEQNLLLKRKLVIQSFLPLFIFIFIRYFDYRMISSICHFIRELMQRNFSVMNRIWDHPYLGPFIAAFISLACSLYGITAMWQFKSMQMSGFVDAGEEIVIEEEITDSGITFFMTFVLPLLLDDVETLRGFIIFTGILGLVIRLMWTTHLYYQNPILTLLGYRIYKFRFLNPVMDGCRDKTMIAVCRTGIAEKKIVKWKYISDDVCLMYNKN

SEQ ID NO: 94009 - protein, 342 aa, Clostridium bolteae 90B7; identical to SEQ ID NO: 93737

SEQ ID NO: 94010 - protein, 212 aa, Clostridium bolteae 90B3
MGEQNLKLKRKLVIQSFLPLFILIFIRYFDYRMISSICHFIRELMQRNFSVMNRIWDHPYLGPFIAAFISLVCSLYGITAMWQFKSMQMSGFVDAGEEIVIEEEITDSGITFFMTFVLPLLLDDVETLRGFIIFTGILGLVIRLMWTTHLYYQNPILTLLGYRIYKFRFINPVMDGCRDKTMIAVCRTGIEEKKIVKWKYISDDVCLMYNKN

SEQ ID NO: 94011 - protein, 335 aa, Clostridium bolteae 90B3
MENKKEHSTNHAIPKTPKEIIVNSLTELFADDEFGFDMFIMMKTVEPSMKHFAFYEGPTGREHDFKLKVQNSIVKSIRDLFLDEEAEYAMAEEAGGNQNIFYIIKQNDDYKPFELLNTPEKQMGPFFMDDRDKADAILFRFRRGVHSIWAYQYILPATIPNKKNQHFFARILDTEQTDCFVEMPEQLFVITRKVDLLIMDDKIITKDIGLMQRHFGFNDFIKASAKKAVSDISDIRLVTNCEKLTAYIERNQTKYSRKMMRIKHYHVVEKTAEELIQIINTVPRWQGVFDIRGGQIYLRTFRDVENLIDLFDERYTVSLVTGDEFDTDVKRLAAP

SEQ ID NO: 94012 - protein, 212 aa, Clostridium bolteae 90A9; identical to SEQ ID NO: 94010

SEQ ID NO: 94013 - protein, 335 aa, Clostridium bolteae 90A9; identical to SEQ ID NO: 94011

SEQ ID NO: 94014 - protein, 212 aa, Clostridium bolteae 90A5; identical to SEQ ID NO: 94008

SEQ ID NO: 94015 - protein, 342 aa, Clostridium bolteae 90A5; identical to SEQ ID NO: 93737

SEQ ID NO: 94016 - protein, 189 aa, Enterococcus faecalis ATCC 6055
MLSLSEKWKLYISSYLPLYFLLLVKEYKHVIAVFTHFNTSGWASLFVCIMIATFLYSIYLIRKIFFGKPIKTFNISGEFEQVADNVMSYVMTYIVPVISVDFSEPVTLLTNILLFIFIGIVYVKNDLIYLNPVISVSHNIYINEKDIVISKYSLGELQRFNKEHIRMVGKKLSSNVILYQEIKSEDKNN

SEQ ID NO: 94017 - protein, 314 aa, Enterococcus faecalis ATCC 6055
MDLNKLYNYSKSLIDDGEVATNVDLFLLRKSKDDDIIVFSMDVDNNLQKDLLKTFVDYFKRSEKRNYPQNDYDVVTSGKFDKEYYKTYTTEYTGVKRFIESFKDGFIDNIKGLNETSFFAYAVKVHMEKEWFIFIAPFAKVSKISATKVLGNLKDNRLTRLDNQDTVGFSSSISMIFEEKELLMTNNLRIFEKCCGMKEEFQKRAKSILNNISTFDSIEELDELMKTIESDSVVAKRLTKMDQNYDRVSSFFKNKTRVSEVLKDDAFKDKFKEIKYENGKLKFEKKHRHIFITLISDACYETIVGKTKGIDFGF

SEQ ID NO: 94018 - protein, 169 aa, Aeromonas hydrophila ML09-119
MRNWLKTLLFVSSFSPTLLVLAGVRYYSVGTFDSLVVQLSVISMAGILLPFLILELVKKEAQRESFSAKKVESADYYLLVFLASYASPVVMKIAEINFFMAVMTISLIFVVAWFVSNIPSHPILYLFKFRFYKIESNDGMVYTLITKRVIRSPRDVTRVMKLSSTMIME

SEQ ID NO: 94019 - protein, 295 aa, Aeromonas hydrophila ML09-119
MSLSLFALTNDPARRIVKFELSHPVQIELTDYIKSQEETFDEVVDEFEFDGKYKPDVGEILYINNYDDIDGLAQAIETPLGVEPVDPSEDFFLIIKALFTGYQKPNGSVKILLQNFDRRKIISTNGLSIFHANNVYKKIEGIGLTVDHKLTATLEDGKLKFYSFHSTRQMFDLSEYYKEATDADVVEFLQIDVMQSVDSDEFIALADSWVRRKISLVQQSGILQNVPLHEIKAVATEFGIPLTTVDENGTEVICVPDNKSDLKKLLRFLDEDYYKSPLSKTHFVTSSKRVVKAQA

SEQ ID NO: 94020 - protein, 188 aa, Firmicutes bacterium M10-2
MSKLVSSCLYFTSFLPLWISILFIDIKSRFESPENLWTERISICVISLASIISFIVLQSAFAHNSKEGSTKLMVKDVADDKTISSEYLLSYILPLFAFDFTKWDQVVLFLIFFVMLGFLCISHNHFSANICLEILNYKMFTCELEDEDKNVIQWKIISHRTLTTHKGEYIYLKSLNNEIKLDINEKKQ

SEQ ID NO: 94021 - protein, 309 aa, Firmicutes bacterium M10-2
MSIDKIKSIFEKVATCEACSLQLLQIKNSKRNGTTYCGREITLSPEGTLTNFLSEISDRYCSQEKGLEKMFESVTDYDGSTVDKTIYKLTTDNELISTECSALIKAIGNPDSEVDPLEFSARAYILKGVIPIDGEELSVKLISMQNPVTSLKHKFLRSNGTFTEISDKVISLRPAIDVVIVDEIVYMLTLAGENLFNMERAYKAVCKKQITNITNSNIINDAEAFSGVASCRHNPRKFISFNESRLQKLKNVDSRKKMSKKFNIPLDGDKFDMSQPGAADKLIKLLCDRGMVDPFDDNPMEVSSSKKWE

SEQ ID NO: 94022 - protein, 197 aa, Escherichia coli KTE61; identical to SEQ ID NO: 93954

SEQ ID NO: 94023 - protein, 323 aa, Escherichia coli KTE61
MFTNIENILKSKRISGEAFFVADVQGTIDIFKVNLEPDAEKDLTTSFSKSLINNIIEPNRGKVAVPLVSTLLERDKQVFEYDHLTINHLPIEFTKMNNVLNFGVNGNATQFDFATQSLTSVKAVIYHLCDGNGNSVVIYQHKYPVSLHKKTKKSFLSLNGRTLDKITHDSIDINDTIDFFFFQNKYYALNIKLLERMYGLESVIDNLANNSTPLIINLGIVNTQGMPVPLDIFKDMYKDRAFMRRLAMVSKGNLVKTGVSVPQIQQVMQKFPVFQRNIDLTGGLINLNTKDQKRYFIRLLNNEASFAALDNSPFLAVEKDSAA

SEQ ID NO: 94024 - protein, 172 aa, Escherichia coli KTE102; identical to SEQ ID NO: 93790

SEQ ID NO: 94025 - protein, 294 aa, Escherichia coli KTE102; identical to SEQ ID NO: 93881

SEQ ID NO: 94026 - protein, 147 aa, Klebsiella pneumoniae DMC0526
MKNKPWLIWWSLGICLASFISVIFFLHYANKNLPSLYKNVETISPANKEVTNYFLSYLFPLLGTDSIADKWQYAVFFYISLIVYICFSENYNFNPLISALGFKFYEAEDDTGVGFVLISKEVITNLKNRDFEVIQLTDYTFMHVTRK

SEQ ID NO: 94027 - protein, 289 aa, Klebsiella pneumoniae DMC0526
MSLFAMMNKNSAVKVYRIDTDRQTDIKIKKIFDDQLSLFESHHNTELVFEAGYTPSYNECSYIDNFDEGKILLDAVQRSTAMPLWTKNVGLNDITAFFMAPAYPQVKDKIAIQTFSKKQILNESRYLWLSKNSFTMSDLLGFNLDDKLVAILEGDKIKFRNFNNLRSIFDMSSYFAEATKQEISDFVNQPVFNIPVGFDLPALADNVIRKKVTLINKSKILVNHTVTEIKNAALTLNFPIKTTGSGSSEKIEMPTNKKEIKELLNFLDEDYFNSEITKQRFRSNSKRKA

SEQ ID NO: 94028 - protein, 201 aa, Enterococcus faecium UC7267; identical to SEQ ID NO: 93786

SEQ ID NO: 94029 - protein, 302 aa, Enterococcus faecium UC7267; identical to SEQ ID NO: 93787

SEQ ID NO: 94030 - protein, 211 aa, Pseudomonas plecoglossicida NB2011
MQSSRDRRHGLTRLGRLTLFLVSYIPLFLIIIFQQFYKNSDYLSFGGFHSDAWMNFAKKFGVATTLIIISILAIIFLIVLLQNLVERAEESGEISKVVDVENKNSESIAYLFTYIIPFVFQDPSDPAQLIPIITLMCVTYTIYVNSSMILINPTLSFWYSLYHVEVESIAGSKKRIIILTKEKFMEEGDLLKMKRIAHRLYFGIDLGRKDE

SEQ ID NO: 94031 - protein, 336 aa, Pseudomonas plecoglossicida NB2011
MSNEALSVVRSLISQQGLSFEVFFIQRKAKIENKRKGFSYTLSRLDASKEINEFFLKSAKAQVEKYIESSAVAQKYSVISDDMPKTLFKYDEAEKLKVSDHTWKKILNGTEIKSAVSLSELKKNIWCYCVKIVSTTDGGKAKALFFKKLTATSVATDAPQGFGKKIKAHFDSTDPKLVEIKTEHITFEDKFDCVLQDNSFLIFSKTAFEKIAELEDEFVELSNETLEIISNHSVVEGLEIVRAEVISKPSMMRTLANIAKNNNHAQIGAAEIENMKQMLLQYEGRELKSTSDGRVLIENKDDVEDFLKLLNDYYKQGMVTGKTYGSNSGSVLVKKS

SEQ ID NO: 94032 - protein, 190 aa, Acinetobacter baumannii NIPH 410
MGLKIWLYLLSLWLLFIFVFFITLKMPVCVSNCDYVGIRQFVFSNIVPLFCLILLILGVVGYFLFDFKVKGSHELPFTISDVESINYEHLTFLATYIIPLISIDFDKTKAPYIFFGLIVVMGAIYVRTDLFYANPSLALLGFKIYKVNGAFRNNENRNAIILITKGNLKDGMRVSYIKLDDRIYFVEEKV

SEQ ID NO: 94033 - protein, 328 aa, Acinetobacter baumannii NIPH 410
MAVTMGIFKEDLKSFSEEQGVTAIVYALLKDGQLKKLDIENKALDDLKNIFLNYIHDEILLNDEMHLLTLSSADERGNVIYEYDLDFPEDFNCINQVSDDKFPKPVFNNSKDDLGNIEALVVEIGNEKRQIVLYKTMANINVFRQKSFILGAVKTDRFERIDKDLLRVSPNFQFIKTNLGFFVLELKTLEKLFSFHTVIKKEATKSCSAIQDRSILENPETLIELIEDIKFARKLVKIYKSSPVLLHSIPNSEIIKFCEHYPSLKGRVRFNEAKNKILLDTKVSKELFIKVLMDDYLTSELTKLHYDTLAKNEFVELPEESSDLLKSE

SEQ ID NO: 94034 - protein, 147 aa, Klebsiella pneumoniae UHKPC59; identical to SEQ ID NO: 94026

SEQ ID NO: 94035 - protein, 289 aa, Klebsiella pneumoniae UHKPC59; identical to SEQ ID NO: 94027

SEQ ID NO: 94036 - protein, 147 aa, Klebsiella pneumoniae DMC1316; identical to SEQ ID NO: 94026

SEQ ID NO: 94037 - protein, 289 aa, Klebsiella pneumoniae DMC1316; identical to SEQ ID NO: 94027

SEQ ID NO: 94038 - protein, 173 aa, Klebsiella pneumoniae DMC1097; identical to SEQ ID NO: 93860

SEQ ID NO: 94039 - protein, 289 aa, Klebsiella pneumoniae DMC1097; identical to SEQ ID NO: 94027

SEQ ID NO: 94040 - protein, 77 aa, Salmonella enterica
  subsp. enterica serovar Typhimurium var. 5- str. CFSAN001921
MLNLLIMIVAIGMIYVKTNRFYSNPSLALLGFRIFKANINDRGTKEFVIICHGEIDNNSRIKYIKLDNNTCLAKITQ

SEQ ID NO: 94041 - protein, 325 aa, Salmonella enterica; identical to SEQ ID NO: 93783
  subsp. enterica serovar Typhimurium var. 5- str. CFSAN001921

SEQ ID NO: 94042 - protein, 212 aa, Clostridium bolteae CAG:59; identical to SEQ ID NO: 94010

SEQ ID NO: 94043 - protein, 335 aa, Clostridium bolteae CAG:59
MENKREHSTNHAIPKTPKEIIVNSLTELFADDEFGFDMFIMMKTVEPSMKHFAFYEGPTGREHDFKLKVQNSIVKSIRDLFLDEEAEYAMAEEAGGNQNIFYIIKQNDDYKPFELLNTPEKQMGPFFMDDRDKADAILFRFRRGVHSIWAYQYILPATIPNKKNQHFFARILDTEQTDCFVEMPEQLFVITRKVDLLIMDDKIITKDIGLMQRHFGFNDFIKASAKKAVSDISDIRLVTNCEKLTAYIERNQTKYSRKMMRIKHYHVVEKTAEELIQIINTVPRWQGVFDIRDGQIYLRTFRDVENLIDLFDERYTVSLVTGDEFDTDVKRLAAP

SEQ ID NO: 94044 - protein, 190 aa, Klebsiella variicola CAG:634
MTTDFMYTGFLYSYGGWCMLNGFARYALTASSVAPVCLTLAFLAYINDNYKILVSSILLAVVSVVFCVFIIKQAQKYNPVTLKNLESASPADKEITNYFLTYLFPLISGPTTFMDWRLALFFYLSLFFYIKHSSSYSFNPILSIIFGFKFYEAEDDTGVSFVLLSTKPLTNAKIKGLKVKKLTEHTYMIV

SEQ ID NO: 94045 - protein, 297 aa, Klebsiella variicola CAG:634
MELFAITDSEIPTRIIKIDIDAPAQTVVENLFRTQRSEFINEDIEEIEFCASYNVQDGEIFSINPFDDEIGIINAIERPDAVPVWDPDDVSVHYFKALFTGEPASNGNPTQVWLQCFDRRQIINNEKSFFQVVTQPGNRFSVSTRPGFSLSDRLTAILVGDKLLFKSFFMLRRFFNMEEYFNEATREDLDNFIGNDIFHVENAEDFMTFADSAIKKKVSLIISSGILNDQPIENLIECAQKIGYQLGITNVNGDNKITMPNSKREVKQLLYFLDQGYFNSIITNELMLTNSKRPIRI

SEQ ID NO: 94046 - protein, 188 aa, Clostridium bartlettii CAG:1329
MNRLNFLNMRIRMFISSYFPLYVILLILYRDKILSIIHYTNIITSIFIITLVALCIISIFVCINLKRTKGNENHIFNEIQKTEDTIISYMMTYIVPILSIDLQDSNTLIMNIILYILIGFMYVRLSLIYLNPLFLMCGYYIYKSENEAVIISNISYIELRSLNGFRLKSTSLGNNIYLVQKSDNIGLL

SEQ ID NO: 94047 - protein, 164 aa, Clostridium bartlettii CAG:1329
MGSISNNRFKKLNKSLLGIDGDVDLIIEENDVLILNHISLERIFSISDHYQEKAQEAINLIHSANRIINFEQFSEDAINDGRIIRTLTKMLKEEDRLSRCFENFNNVVNVIDLFDLDINIQNSNGVDMIVYEDKNQLMDIIRLVRDSYYTSLINERQGIDDTLV

SEQ ID NO: 94048 - protein, 212 aa, Clostridium clostridioforme CAG:132
MGEQNLKLKRKLVIQSFLPLFILIFIKYSDYRMISGICHFIRSLMQGEFSVINRIWNHPYLGPFAVTIASLACSLYSITAMCQFKSMQMSGFVDAGEKVVIEEEITDSGITFFMTFVLPLLLDDVETLKGFIIFTGILGLVIRLMWTTHLYYQNPILTLLGYRIYKFHFINPVIDGCKDKTMIAVCKTGIAEEKIVKWKYISDDVCLMYNKN

SEQ ID NO: 94049 - protein, 350 aa, Clostridium clostridioforme CAG:132
MENQREHREHGKKDVAEKTSKEIIVNSLAELFADDEFGFDMFIMMKTRNPPIKHFTFYEGPTGRENDFKHKVQNSIVKSIRELYLDDEAEYAMAEQAGGNQNIFYIIKQDDDYKPFELLNTPEEQMGPFCMDDRDKADAILFRFRRGLHSIWAYQYILPATIPNKKNQHFFARILDTEQTDCFVEMPEQLFVITRKVDLLIIGDTIVTKDIGLMQRHFGFNDFIKASAKKAVSDISDIRLVINCEKLTAYIERNQTKYSRKMMRIKHYHVVEKTAEELIQRVNTVPRWQGVFDIRGGQIYLHTFRDVENLIDLFDERYTVSLVTGDEFDTDVKRLVVPGGKDGEGLKRQG

SEQ ID NO: 94050 - protein, 177 aa, Coprobacillus sp. CAG:826
MSKLMKMLLTFTSWAMLFFIYSFTFLLDGLWTKKIANNCTIGIILFIFGIILTLLFYAIIKSAKKKLEKHSIIIKNISNADPNLIDDIGTYLLPLLTISISDVNFSVLLTMFLVILLVVWLTRATLKNPLFIFFGYRQFDIYNENGRMYKLITKTKKINLTEKHDVVELFDEIYLEV

SEQ ID NO: 94051 - protein, 303 aa, Coprobacillus sp. CAG:826
MLIETDEIFVWTKKGKECKVFRLKTNQETKRKIINAFNDGIKELLTNDIGKDRERINFESHYYADLKEELLMIQNFKVPQELLDAFDQPDLLDCFEPNKEGKTKENYEIKAIIIGRKEGENYFFACQKFTPKKMVMKKKGIYLLYDRNTFVTEEPKFSINIEEKIDCIFTEGNLIFEKYNEAKGVFELDDYYRIASQKEVQDFVRSNVFRIDNDKLFYKHTSSVFMRKKIAKIIDLGTLNDTEKIYKNARVVNMDIEFTEDGKQIIMPVEYKKLRKVMSFLAEEIYSGQFTNYTYLTNSTRKI

SEQ ID NO: 94052 - protein, 177 aa, Clostridium sordellii ATCC 9714
MKKSVKWLLFISSYIPLFIILIFTNIDFKSTYNFIQYILTNRCEFILKNIKFQDIYLWILIILCITCLVLVKIVIIQSRGFEDNKKIIDIEPNNNSILEYFVTYLLTLSSSGFSFKEVFIFWFILYIIGHLYIKNNQFHINPTLCLLFKYNIYKVKTENSKECFILSKLMNMNLIVI

SEQ ID NO: 94053 - protein, 143 aa, Clostridium sordellii ATCC 9714
MFSYNYHYTTKATITLDSIKSSNILSNFDEFKLDCLDRSTITRKLAELCVHGDINIFIDKLKNNSKSIEKTIEKYNLDISLKDNKIVYSDVSSLSEIINLISDNYFKGDITNDIYLARGKSRLSSGKSNPKKELLQKKKIQKK

SEQ ID NO: 94054 - protein, 210 aa, Geobacillus sp. A8; identical to SEQ ID NO: 93692

SEQ ID NO: 94055 - protein, 321 aa, Geobacillus sp. A8; identical to SEQ ID NO: 93693

SEQ ID NO: 94056 - protein, 194 aa, Peptoclostridium difficile DA00129
MFNKIMLFLSSYIPLYILMIGKNILERTTIDGKFKHISSNIILFDGINDYAIAILTVLLVISFIYLYVKVKNVKMEKHYKVISFEDETVNYFFNYISIYLISCMGLSLNRITDVFIIIFMMFLVGYIYISNNIIYLNPVINIMGYKVYNSKLEALSTGEIINSIVLFKRNMEFKCEIEVIGTEKNNFIIAKTNK

SEQ ID NO: 94057 - protein, 311 aa, Peptoclostridium difficile DA00129
MLNNSIKKIEQILIDYKNVQKESLEINVMFVNSNVKRKNKKFKGYMANISKDDIMPVVQTSMDNIEKEVKKNDFSNYDFEVSDNKKTYIIEEKNVFFSKDIIEEITLEQNNFNTIGDLVNFEKLNFVVIQVYFNNKKLYLFSRYIHPGKALKNTYKYTLNSKKPKLIKDDILTISSYVDAFLYDGSYFIFNEPNFRKIFKFDEAYKKLVDLNKEKIKYIFTKETSFIEDCIKDGRYLPRLAKLLNSDILKNIDKDKVKHVISFHKLQLNTDSSGLIEYENKSNIPLILNLFLDHYVITSLTQEKKVAKAFE

SEQ ID NO: 94058 - protein, 194 aa, Peptoclostridium difficile DA00196; identical to SEQ ID NO: 94056

SEQ ID NO: 94059 - protein, 311 aa, Peptoclostridium difficile DA00196; identical to SEQ ID NO: 94057

SEQ ID NO: 94060 - protein, 194 aa, Peptoclostridium difficile Y270; identical to SEQ ID NO: 94056

SEQ ID NO: 94061 - protein, 311 aa, Peptoclostridium difficile Y270; identical to SEQ ID NO: 94057

SEQ ID NO: 94062 - protein, 194 aa, Peptoclostridium difficile P7; identical to SEQ ID NO: 94056

SEQ ID NO: 94063 - protein, 311 aa, Peptoclostridium difficile P7; identical to SEQ ID NO: 94057

SEQ ID NO: 94064 - protein, 194 aa, Peptoclostridium difficile P50; identical to SEQ ID NO: 94056

SEQ ID NO: 94065 - protein, 311 aa, Peptoclostridium difficile P50; identical to SEQ ID NO: 94057

SEQ ID NO: 94066 - protein, 194 aa, Peptoclostridium difficile P70; identical to SEQ ID NO: 94056

SEQ ID NO: 94067 - protein, 311 aa, Peptoclostridium difficile P70; identical to SEQ ID NO: 94057

SEQ ID NO: 94068 - protein, 194 aa, Peptoclostridium difficile P73; identical to SEQ ID NO: 94056

SEQ ID NO: 94069 - protein, 311 aa, Peptoclostridium difficile P73; identical to SEQ ID NO: 94057

SEQ ID NO: 94070 - protein, 194 aa, Peptoclostridium difficile P75; identical to SEQ ID NO: 94056

SEQ ID NO: 94071 - protein, 311 aa, Peptoclostridium difficile P75; identical to SEQ ID NO: 94057

SEQ ID NO: 94072 - protein, 171 aa, Escherichia coli HVH 9 (4-6942539)
MLNKLAKYLLTASSVAPVFFTLAFLSCISKHYKFMIAYLSLCAIILLLCVLIVKYAIKYNFVTSKKLTTASPADKEITNYFLTYLFPLISGPDAFMDIRIASFFAVSLFFYISFSGSYSFNPLLSFWGYKYYEAEDDTGVSFVILSKKPLLKASGNRVNLIKLTDYTYIAI

SEQ ID NO: 94073 - protein, 297 aa, Escherichia coli HVH 9 (4-6942539); identical to SEQ ID NO: 93815

SEQ ID NO: 94074 - protein, 204 aa, Escherichia coli HVH 9 (4-6942539); identical to SEQ ID NO: 93768

SEQ ID NO: 94075 - protein, 340 aa, Escherichia coli HVH 9 (4-6942539); identical to SEQ ID NO: 93953

SEQ ID NO: 94076 - protein, 204 aa, Escherichia coli HVH 33 (4-2174936); identical to SEQ ID NO: 93768

SEQ ID NO: 94077 - protein, 340 aa, Escherichia coli HVH 33 (4-2174936); identical to SEQ ID NO: 93953

SEQ ID NO: 94078 - protein, 173 aa, Escherichia coli HVH 41 (4-2677849)
MLNKLAKYLLTASSVAPVFFTLAFLSCISKHYKFMFAYLSLCAIILLLCFLIVKHSIKYNSVTSKKLTTASPADKEITNYFLTYLFPLISGPDAFMDIRIASFFAVSLFFYISFSGSYSFNPLLSFWGYKYYEAEDDTGVSFVILSKKPLLKASGNRVNLIKLTDYTYIVIQE

SEQ ID NO: 94079 - protein, 51 aa, Escherichia coli HVH 41 (4-2677849)
MELFAITDNTVGTRIVRIVTDRPTQNVVTQLFSEQKTFLHRRCGIFRWIHH

SEQ ID NO: 94080 - protein, 204 aa, Escherichia coli HVH 65 (4-2262045); identical to SEQ ID NO: 93768

SEQ ID NO: 94081 - protein, 340 aa, Escherichia coli HVH 65 (4-2262045)
MLKLEELLEYAEQLKDDDAAKISLYFITRHLKAGMSRTARVVDKFDFKIIKAPIAPDIAKFFKYTLSNQIISHASKDDIVMKKYTVIDDDIDNKIYAYAMNNAISFSKVINNDIKNDKPVVLTSLAEVQNDLWAYCIKVQKGADVTYSFRKISRGKVTTNEPQNMTQRVFALFDKTDKELRSFDGSAVNFDDKIDCIYIKDQFYVFHKKSFEAIVGLEVEFTEAAQKTLNTIKELDLIEGLDVIEQAILHKPSLRKILTHIAEKGNHTVLEKNDVQAMNDVLKMFQNEEFKTNEHGKLVIEDERQGRNFLKLLNDYYKQGMTTKKYYGTDSGNVINPIKA

SEQ ID NO: 94082 - protein, 171 aa, Escherichia coli HVH 80 (4-2428830); identical to SEQ ID NO: 93814

SEQ ID NO: 94083 - protein, 128 aa, Escherichia coli HVH 80 (4-2428830)
MLRRIFDVDAYFREATNEELTSFSSHEKFSVAPGFDLTTIADSVIRKKVSLINKSRILEDYSVTELRISAAEIGVVLETEKIGELEKIKMPQIRKDVKRLLHFLDEDYFTSHITRTLYRANSKRREDV

SEQ ID NO: 94084 - protein, 172 aa, Escherichia coli HVH 193 (4-3331423); identical to SEQ ID NO: 93790

SEQ ID NO: 94085 - protein, 294 aa, Escherichia coli HVH 193 (4-3331423)
MALFAVIDNTIATRIVRVELDATASTSVTAIFQQQRQYFESHHNNMIPFYAGYTPKHSECFEIQNFTDSARLIDAVNRPTAVPIWDPSQIDIGYIKALFVGVDAPANPNIIALQTFNKKQILDTSKSFFGKLFASKTTFSKANSIGFNVDDKLVAIIINDTIRFKSFFNLRSIFDMSSYFSAATDQELNAFSQLSIFSTPQGFDLKSVADTVIRNKVTLINQTGMLTPQNMSKFKSEAAKVNFPLQTIIVGGVEKIVMPSSKKEIKALLDFLEEDIWVSGISGRRFKSNSKRPI

SEQ ID NO: 94086 - protein, 204 aa, Escherichia coli HVH 200 (4-4449924); identical to SEQ ID NO: 93768

SEQ ID NO: 94087 - protein, 340 aa, Escherichia coli HVH 200 (4-4449924); identical to SEQ ID NO: 93953

SEQ ID NO: 94088 - protein, 204 aa, Escherichia coli HVH 207 (4-3113221); identical to SEQ ID NO: 93768

SEQ ID NO: 94089 - protein, 340 aa, Escherichia coli HVH 207 (4-3113221); identical to SEQ ID NO: 94081

SEQ ID NO: 94090 - protein, 204 aa, Escherichia coli KOEGE 77 (202a); identical to SEQ ID NO: 93768

SEQ ID NO: 94091 - protein, 340 aa, Escherichia coli KOEGE 77 (202a); identical to SEQ ID NO: 94081

SEQ ID NO: 94092 - protein, 204 aa, Escherichia coli UMEA 3087-1
MRVNKLHLGARVSLFIVSYLPLFFIMCFVQLYTYRSYLNWKGISVESLTIFFKYFGAVSVIGVLSLFGIVGLTIFLKNIKRRCATSGRTVRVIDIENKNNESISYLFTYIIPFVFQDLSTLINVIPIAILLTVTALIYINSSMILINPTISINYTLYQVTYLDLESDKKRTGMVLTKSKYLEEDDLLDVEDVGPKLFYAESHKE

SEQ ID NO: 94093 - protein, 340 aa, Escherichia coli UMEA 3087-1; identical to SEQ ID NO: 94081

SEQ ID NO: 94094 - protein, 204 aa, Escherichia coli UMEA 3687-1; identical to SEQ ID NO: 93768

SEQ ID NO: 94095 - protein, 340 aa, Escherichia coli UMEA 3687-1; identical to SEQ ID NO: 94081

SEQ ID NO: 94096 - protein, 204 aa, Escherichia coli UMEA 3821-1; identical to SEQ ID NO: 93768

SEQ ID NO: 94097 - protein, 340 aa, Escherichia coli UMEA 3821-1; identical to SEQ ID NO: 94081

SEQ ID NO: 94098 - protein, 204 aa, Escherichia coli UMEA 4207-1; identical to SEQ ID NO: 93768

SEQ ID NO: 94099 - protein, 340 aa, Escherichia coli UMEA 4207-1; identical to SEQ ID NO: 94081

SEQ ID NO: 94100 - protein, 182 aa, Alcaligenes sp. EGD-AK7
MKFELYIISLWLLFVLMIIVKVDIPTCFGADCHYVGTLQLARTNVLPIISLIFIGLVILCYSRFKYRTQGNVGLPTIAKKVEDLSYEHLTFLTTYIVPLICFNLDNIRYIVALFVLLFVIGQIYVKTDKFYANPTLAILGFRLYKLEVDGVSKVMITTQRISELDKIVFTTIDEKFVSGRKA

SEQ ID NO: 94101 - protein, 323 aa, Alcaligenes sp. EGD-AK7; identical to SEQ ID NO: 93921

SEQ ID NO: 94102 - protein, 181 aa, Lactobacillus fermentum 3872
MLGLIFKTILFFSSYIPIFVMIFLNNLDSFSNNSIEKTWNQNPSLWLSMIILSVITLIILFIWIKILKDEAADTTKQEYQLEDLRKYDSEVLNFFVTFIIPILSLEPKSGPSIVMNLILVIIEGIYYISNNALYFNVILIILGYHVYTFSNDNIVISRKTKDQLFISQQASQIGTTNIFYA

SEQ ID NO: 94103 - protein, 222 aa, Lactobacillus fermentum 3872
MSTQKFDSAKLWDSFNFNRNSLMLHLTGRRYNGSLFSVTPTINKSIQEGIINLIEGQINYYNNQNLKQYDIVGSNDDTVEYADPNDFINELGEIFNSLKKPTAINNIDPNSFDFFTYEFKSANNESIYVFRKINRMKALKKGILGEIANGSFTKIKSSKLLGIDNAIDFIVIDDKIFIFHHISLERVLKLKDQFKDKAKDVLSNDEFAKKNKKFLINSRKEH

SEQ ID NO: 94104 - protein, 181 aa, Lactobacillus fermentum 3872; identical to SEQ ID NO: 94102

SEQ ID NO: 94105 - protein, 302 aa, Lactobacillus fermentum 3872
MSTQKFDSAKLWDSFNFNRNSLMLHLTGRRYNGSLFSVTPTINKSIQEGIINLIEGQINYYNNQNLKQYDIVGSNDDTVEYADPNDFINELGEIFNSLKKPTAINNIDPNSFDFFTYEFKSANNESIYVFRKINRMKALKKGILGEIANGSFTKIKSSKLLGIDNAIDFIVIDDKIFIFHHISLERVLKLKDQFKDKAKDVLSNDEFAKKIRNFDKLKKRALENGNYVKRLAKLYENDGITMFLDKIDRTKNVIEQFNLDIEVSNGQLIYRDETQTGNFVNLMQDSYYKTLIGDQNGIDEKR

SEQ ID NO: 94106 - protein, 197 aa, Enterobacter cloacae EC_38VIM1
MDSRPYLKTVLYILSLWLLFLSLLIMSYDKVLIKNVWDYIFTENFTFPISSLRVRNIVFIVSLVFIFIGAIILIILANSFGSGWSVACTVSDISNENHEHLEFLTTYIMPLVFTDVDSKRTVLNLGLMIFVIGAIYVKTNRFYSNPSLAILGFRIYKANVHDRGVKKCTIICRGVLKSTDSIKYIKIDDETYLAKII

SEQ ID NO: 94107 - protein, 323 aa, Enterobacter cloacae EC_38VIM1
MFTDIENILQSQKISGEAFFVADTQGVVDIFKVNLEPNAEVDLTTSFSKSIMDNIIEPNRGKAVIPLVSTLLERDKQVFEYDHLAINHLPIEFTKMNDVLNFGVNGNATQFDFTTQSLTSVKAVIYHICDGNGNSVVIYQHKYPVSLHKKTKKSFFSLNGRTLDKITHDSIDINDTIDFFFFQNKYYALNIKLLERMYGLESVIDNLANNSTPLIISLGIVNTQGMPAPLDIFKDMYKDRAFMRRLAMVSKGSLVQTGVSIPQIQQVMQQFPVFQRNIDLTGGLVNLNTKDQKRYFIRLLNNEASFAALDNSPFLAVEKDSAA

SEQ ID NO: 94108 - protein, 184 aa, Prevotella pleuritidis F0068
MSLWLLFVMIIIITIRIPICFSKDYSFVGISYLLLTNIIPLCSGLALFIGGCSYFNFEHQLKGTKELTFKITEIENIDYEHLTFLTTYIIPLVCFQFENLRYVIIFVILLIIIGLIYIRTDIFYTNPTLALLKFRIYKVTGTFRKEEVRENIIIITKEELNIKDDVKYIKLDKRIYYASKVKNR

SEQ ID NO: 94109 - protein, 313 aa, Prevotella pleuritidis F0068
MDSALAFIDAPQGELQIILYASLESIAEPRKLDIREEDLSGLRDLFVSSIQASIIEKEDYTVLPLSTADERGNCFYQYDLEVPDELQLLETTIGNDNLQNFSFPDNQFSNIESLIIVLADREHEIALFKKLSAVEVIGRGGFMLWKSNQRLEKFNDQLLRISSRFQALRVGGEIIITDLASIEKGFGFHDIIIREATNSLGVIEGLQLVSNIDSLKELVNDVRFARKLTKVARNSPVIQRNIPNTDIIAFSKRHPLTKNKMRYNENQTQFLLDTRVSKDLLIKILNDDLLTSELTKLYYDSLAKDGIEVEEEE

SEQ ID NO: 94110 - protein, 90 aa, Salmonella enterica
  subsp. enterica serovar Typhimurium str. 35423
MPLVFTDVNSKRTMLNLLIMIVAIGMIYVKTNRFYSNPSLALLGFRIFKANINDRGTKEFVIICHGEIDNNSRIKYIKLDNNTCLAKITQ

SEQ ID NO: 94111 - protein, 325 aa, Salmonella enterica; identical to SEQ ID NO: 93783
  subsp. enterica serovar Typhimurium str. 35423

SEQ ID NO: 94112 - protein, 198 aa, Salmonella enterica
  subsp. enterica serovar Typhimurium str. 34502
MKKRTGLKYALYILSLWLLFVSLFIMSYDKNLFVSISTYLDSKDTGTLLSSITPKNIVFISSFAMIVAGVLIFLYLLLSFNSGWSVACTVSDVRNESHEHLEFLTTYVMPLVFTDVNSKRTMLNLLIMIVAIGMIYVKTNRFYSNPSLALLGFRIFKANINDRGTKEFVIICHGEIDNNSRIKYIKLDNNTCLAKITQ

SEQ ID NO: 94113 - protein, 325 aa, Salmonella enterica; identical to SEQ ID NO: 93783
  subsp. enterica serovar Typhimurium str. 34502

SEQ ID NO: 94114 - protein, 193 aa, Pantoea agglomerans Tx10
MQFQIIPGFFIFLGSYLPLAFILALQDIPKTWWSKKLCTVQSFSDGSCVFIPFENPIISISFLLVTFIAILIVLVSLKKIKYPFEVEVKKYKKIPNEIINYTFPYIVSFMGISYGDPQKLIGFMVFLLWMFAITYKSGQILMNPLLIIMKWKIYEATIVISNVEKDVRILTQGDLGIRKVSAQTIQDFYIVKG

SEQ ID NO: 94115 - protein, 304 aa, Pantoea agglomerans Tx10
MQAQFNSFKSHDIINSNVYLWVFKRSATASRFTAHYVQTDDPLNEQLKLIALSEFQRITEFQAYSYLAETNENSCLSTVIAGSDFTSLKTLVDRPEPDFRLQNVKELKNVSGYVVKFINNGLTLYAIKRSTKNWKASFLKTHVNIVFRNGELSAAEDEAFVIERNFDFYAIDTALFIANKRAFESVMEHRASYTDAFTNLQLKASFSDLFTDMTTLINYVGNNSIQLRRMARVEEKALFQSPHFLSAVQNVNNRRAWGLNFDPITGKIIPCEQTIKTIMQILLDHRLLSEVTDVTYDVPDATQI

SEQ ID NO: 94116 - protein, 196 aa, Prevotella salivae F0493
MVSFVSKFLFTATVTAPVFLSLGLIGIIKDSKNYFQYWNKLLENNIIPNSFEWWSINISFAFMLICLIGIKIFLRKKSCKCGKGKTIKAQFYSNLSQNSAEQVISSIIPWLTIFADRLDFMVLFVCIILQCCFIAIASYNNNNYNLLCSIWGYRYYEVKTEENTYILISQKCIRNKNEIKTFVELTDYMGLIINDK

SEQ ID NO: 94117 - protein, 283 aa, Prevotella salivae F0493
MSQFYALMHDNTVKYISLKEEIVTDVRNLFINGGAILKPEGIEEDVFDGNILSRNGENITYVNYNLPEDFIHIPDNQADMSEYNINEDIPKSIFYYNDGKIYFQVFNKKNMLQRKMVLQFEHGNVFTKMNNTAFIVEDKVHAIYEDGKLYFQNYTIANQIFSLIDFITEATNTEIESFGEIEGINVSTENIKHIANIKTRRLIKLLSNTDNIATFMRKASRTRTSLLRKYGVNAQINENNELVLLTNNVADLNRVLEFLNEDIFRGVITDSLYRSNSKKKDNH

SEQ ID NO: 94118 - protein, 192 aa, Pseudomonas sp. HPB0071
MKVKILPAIFLFLGSYFPLSVILLLQDVSEATWKQSICWSLDNCTLPTLMNPDRSLPLFILCLISLAFFTWVLKSLPSDDELTVREAKTVPNDLINYVFPYVVSFMGLDLGSNGKFYGFLVFLSWMFLITYRSGQILMNPLLLAIGWQLHELEIITSGKERSVIALAKTRVYPGNTLNSCVIQGIYVLTKKE

SEQ ID NO: 94119 - protein, 307 aa, Pseudomonas sp. HPB0071
MAAIDVLNKLQGLDLQNAIVSVWAFKKSASKNAKFRALSVVVTSDLKNELSRIARQCIDRCTEIDDYSLLTMTNESSCLYLESDETIFPKLEELVSQPPQEHRIENLSDLEGSLGYLIRLSIGEDTLYCVCRLGNDWKVKKRAQLLNLVLNRNQLDLANDQAFIIPKRFDFFVLNKDILVLNKGNFESILEYKQTYVTSFADLQADAGFQAIFSDIRILVDYVGTNTMHLRRMAVVQERGYYNDAVFMEKLRQISQERQWSIAFDNEGRIIPSVDSARTIIQVLLNQRLHSELTGDDFDVPSANPVA

SEQ ID NO: 94120 - protein, 191 aa, Streptococcus sp. I-G2
MQRDLFSKWTLFITSYLPLYLWLLFSNINYSKFSFERLIAFDFDHKLIRIVFVVLIFISIIKLWKLFKFDGKESLKIPREMEISPESDSLMNYIVTYFTPLLSFDMNNTTSIFMNSLLFLLIGLMYVGSNASYLNPVLGVFGFKIFGVTGFPHAHHIITNLSFDDIETARATDVELTSYRLGDGIYILKRK

SEQ ID NO: 94121 - protein, 325 aa, Streptococcus sp. I-G2
MIQININDEKNRLISFSQQPDFDEYVKIFLIKIKKNEIFLYKQDADKKTKENILKAIIESMNKSTFSNREIKPYDPVITYKNVHEQVEVSEYENVQSVISQFNDEQQHLLSTSCETEKDLHNYLIEIKKSGVINLKFIGSFVNAFQLKKKMLFGNFTDSKIKLRERNNLFGLNKKIDLMIVNDEKILINQAESKFDSIFGMNKKFAEQATEILNTDANIKTIFEQASINFLKTKVINGKRLATRLIKIVSDTNRFTETVKHIDKIQTIKDDPNHKFYKEIEGVTFSNGKLSITDEKNCVQLINAISDALVTAYISEVETVEEGRM

SEQ ID NO: 94122 - protein, 199 aa, Pseudomonas aeruginosa BWHPSA002
MDNTRDPSLRLRPWASLVLFLSAYSPLMLILIIKDYDATSPGLLPQNPVFSGILLLIAVFSSLAVLRSVREIDGGLTVTVTKASNKSGDMFGYTIPYMLSFMKVDLGDWQVIVSLALFLAILFIMAYRTQTVFVNPILALAGYMLIDCTFKRGDKEIQAMVVTRQPLAVGDTCRMERMSHYLYVAVKDNANLDKKGTEK

SEQ ID NO: 94123 - protein, 312 aa, Pseudomonas aeruginosa BWHPSA002
MSNKAHKATLKAIKAIDLKKWGVTFWLVKRYMANHAAHYSVLRVNTDAKLQKRLKGYVVNQLQGKDFHLAEYDFNNADGDDTLFTITADATDFPKVEVAINAGFDNAIAKEYQDLLNSWAYVVQLEHGNDRLYAWRKISTLTQPKKVQSRQATFFVEHKLVDVEDKEVFLIDPRFDFFVHGGMIFIANKKEFEISMNFREGMKAKAAEVIQNFNESGRFKNVDLIQKHVGDNLHHLRKMASILKAGYYQQPDYIQRMIEVSKEEGWELKVEDGQVVVEAETIDVLLKLLNNDRLRSPINNEIFDAAAKAPVK

SEQ ID NO: 94124 - protein, 167 aa, Salmonella enterica subsp. enterica serovar Agona str. 266757-1
MGNQLSLSVSRLCVCIFLVFLCGYTYWWYKRQLSFLDRGITSAEVVVVGCEKESTEYLSFLSTYIMPLVFTDLTKPSNVFNFIFILVIVGFLHIKTRRIHSNPTLSLFGVSAYKIDYIIRVDGQDSDITKGLIVLSKDEISVKSVIRIIKKEDYITFAKYIRNDSNG

SEQ ID NO: 94125 - protein, 381 aa, Salmonella enterica subsp. enterica serovar Agona str. 266757-1
MAEEKLDLSELHHDAQKASELSSYYSHFDTKVEDFDLHVYFNFRHKIKGGDGKYRYEYRVAKIDDTTVLKESIKDNVITKTLNDLSSGGVAVSDIKQLSDRASTISFLEDAKSYKDEQMSFLTGIIFDKGFGGDGDIPVVNFEKFDKISKVDSIVFVLRKGDKCITIYKKQYPIQNLTKQKNHYFSYSKDTLSKIDADMISIDGKASIVFVKGTAYIYDQDVFEKFFGYKKWIKKVAGEFVSEMKQKFSSIVDFGKVTDRLEKESADADAFSRKLARIYNNKDLRASFNTVTPEKISDFLVENEYFARLLKYKSAEEPLEVSTHDQQEAFILIVSEGVLRSLITGFDYLSPAAKRKIATGQTAQKPSSVVTRIPSSASDAA

SEQ ID NO: 94126 - protein, 167 aa, Salmonella enterica subsp. enterica serovar Agona str. 467481; identical to SEQ ID NO: 94124

SEQ ID NO: 94127 - protein, 381 aa, Salmonella enterica subsp. enterica serovar Agona str. 467481; identical to SEQ ID NO: 94125

SEQ ID NO: 94128 - protein, 200 aa, Clostridium autoethanogenum DSM 10061
MVSSLAKIFMFLSSYSPLYILTITLNYNFLDIKEAIIKVSNVKNIVYSDILLYGLFLLIVIPNVILYILISISKKYDEPIKLLKIEDGNEKVLDYILAYIVSFVTTDFPKIRTNDSKIVITAILTQILLGYLYCKGNMFYINPILDLMGYNIYIGKTLQNNVIILSKNKETIKDIKESISKNGFKNIDLNCFADNIYLTK

SEQ ID NO: 94129 - protein, 152 aa, Clostridium autoethanogenum DSM 10061
MKKIDKDILSLNNKFDCVMYKEDIAIFTQLYFEQIFDYKDEYTKKANKTISKIKKLNIIENIDNIESDCEKITIKKKMSKIKDESINWFKEKVESNIEDIKNIISKANLDMEVRNGKIISNDTSELIHLIQDDYLKSNLSGNNFVADKKTKI

SEQ ID NO: 94130 - protein, 204 aa, Escherichia coli 110957; identical to SEQ ID NO: 93768

SEQ ID NO: 94131 - protein, 342 aa, Escherichia coli 110957
MKMLKLEELLEYAEQLKDDDAAKISLYFITRHLKAGMSRTARVVDKFDFKIIKAPIAPDIAKFFKYTLSNQIISHASKDDIVMKKYTVIDDDIDNKIYAYAMNNAISFSKVINNDIKNDKPVVLTSLAEVQNDLWAYCIKVQKGADVTYSFRKISRGKVTTNEPQNMTQRVFALFDKTDKELRSFDGSAVNFDDKIDCIYIKDQFYVFHKKSFEAIVGLEVEFTEAAQKTLNTIKELDLIEGLDVIEQAILHKPSLRKILTHIAEKGNHTVLEKNDVQAMNDVLKMFQNEEFKTNEHGKLVIEDERQGRNFLKLLNDYYKQGMTTKKYYGTDSGNVINPIKA

SEQ ID NO: 94132 - protein, 170 aa, Klebsiella pneumoniae 909957
MNRLARLLLTASSIAPVCATLFFIGFVKETVWLMNYSLYVGLASWCLAIGLVKYADCKMERLTKNINSLSPANKEVTNYFLSYLFPLLGTDSISENKSYALFFYFSLLFYICFSENYNFNPVLSLHGYKFYEAEDDTGVGFVLISKSVITDIKNISFNVVQLTDYTYLHV

SEQ ID NO: 94133 - protein, 294 aa, Klebsiella pneumoniae 909957
MALFALMDKSIATRVVRVELDLGASTSVSSIFQQQRLHFQTHHNNHIAFYAGYEPRYDECFEIQNFADAALLIDAATRPTAMPVWDPSQISIDNIKALFVGVDAPGNPNIIALQTFNKKQILDTSKSFLATMIGRSTTFSKAVDVGFNLDDKLVAIIDNNTICFKSFFKLRSVFDMTSYFTAATDQDLDAFSQLPIFSIAQGFDIKNVADTVIRNKITLINQTGLLTPQNLALFKAEAVKVGFPLQTVVVGGVEKITMPSSKKEIKSLLDFIEEDIWVSGISGRRFKSSSKRPI

SEQ ID NO: 94134 - protein, 172 aa, Salmonella enterica subsp. enterica serovar Miami str. 1923; identical to SEQ ID NO: 93790

SEQ ID NO: 94135 - protein, 294 aa, Salmonella enterica subsp. enterica serovar Miami str. 1923; identical to SEQ ID NO: 93881

SEQ ID NO: 94136 - protein, 167 aa, Salmonella enterica subsp. enterica serovar Agona str. 648586-1; identical to SEQ ID NO: 94124

SEQ ID NO: 94137 - protein, 381 aa, Salmonella enterica subsp. enterica serovar Agona str. 648586-1; identical to SEQ ID NO: 94125

SEQ ID NO: 94138 - protein, 195 aa, Escherichia coli UMEA 3323-1; identical to SEQ ID NO: 93788

SEQ ID NO: 94139 - protein, 319 aa, Escherichia coli UMEA 3323-1; identical to SEQ ID NO: 93789

SEQ ID NO: 94140 - protein, 204 aa, Escherichia coli 907710; identical to SEQ ID NO: 93768

SEQ ID NO: 94141 - protein, 342 aa, Escherichia coli 907710; identical to SEQ ID NO: 94131

SEQ ID NO: 94142 - protein, 203 aa, Escherichia coli 907889
MISSLGDNMKRKSTFNKMGLYILSLMLLFVFIIILSAKIPFCYGSSCHFIGFYQLASSNIISIICLIFIGIAFYFYRRFKGLTKVNNADCVTITACQSESYESLTFLATYIVPFMGFSFDDPQKNIAYFLLIVVIGLIFIKTDKYYANPTLALFGYKLYRVNISHAGSGEVKNVIAISMDVLTVDDQVFYSFFDDYVFIARKK

SEQ ID NO: 94143 - protein, 319 aa, Escherichia coli 907889; identical to SEQ ID NO: 93789

SEQ ID NO: 94144 - protein, 90 aa, Escherichia coli 910096-2
MPLVFTDVNSKRTVINLLLMICFIGVIYVRTNRFYANPSLAILGFRLYKCVIKNDPSGKEYTVICRGKMSNDCQVKIKKIDDDTLIAKLI

SEQ ID NO: 94145 - protein, 335 aa, Escherichia coli 910096-2; identical to SEQ ID NO: 93879

SEQ ID NO: 94146 - protein, 166 aa, Eubacterium brachy ATCC 33089
MIFLNDMKEFSLEQVGITLHKNTVFWSVLTGVFILSLLTLIFWLVRMARNAQKQVKLYEIYDIRNNDGEVLSYFITFVIPILSLKVDSAPSIVMNGMIMALVGIYFVQNNVLHFNPLLLLAGYHIYSDSADHIIISRCDKYTIKNKGLKADQFGSSNIFYIKKPKP

SEQ ID NO: 94147 - protein, 296 aa, Eubacterium brachy ATCC 33089
MKMEIFERARRNVDTGNVVIYFCIKNDRETVPIKFNLGNDSKEKIREIAREVLRKCEKYSIEKYNPIGAISNTLEKTTTDEFEMVQELIDSLEKPGVSDDITAEDVNFVIYEFRTMKGISYFMRRYTKLQIFKKGFLGRLMDDKFEKLDASKLLGIDATVDIIVDGRDILIIQHTAFERIFDLDREFVEAAKEVLSNPKLDEKIEGFKQLKEDLLDNGSYVKRVSKLKNRKNAMVFLDAPENTKKAIDEFRLNIPISPSNKYVYTGKSQLGEFINLMQDAYYKTIIGGEKGTDERR

SEQ ID NO: 94148 - protein, 197 aa, Klebsiella pneumoniae BIDMC 25; identical to SEQ ID NO: 94106

SEQ ID NO: 94149 - protein, 323 aa, Klebsiella pneumoniae BIDMC 25; identical to SEQ ID NO: 94107

SEQ ID NO: 94150 - protein, 199 aa, Enterobacter cloacae BWH 31; identical to SEQ ID NO: 93940

SEQ ID NO: 94151 - protein, 319 aa, Enterobacter cloacae BWH 31; identical to SEQ ID NO: 93941

SEQ ID NO: 94152 - protein, 185 aa, Klebsiella pneumoniae BWH 28
MYTGFLYSYGGWCMLNGFARYALTASSVAPVCLTLAFLAYINDNYKILVSSILLAVVSVVFCVFIIKQAQKYNPVTLKNLESASPADKEITNYFLTYLFPLISGPTTFMDWRLALFFYLSLFFYIKHSSSYSFNPILSIIFGFKFYEAEDDTGVSFVLLSTKPLTNAKIKGLRVKKLTEHTYMIV

SEQ ID NO: 94153 - protein, 297 aa, Klebsiella pneumoniae BWH 28; identical to SEQ ID NO: 93927

SEQ ID NO: 94154 - protein, 173 aa, Klebsiella pneumoniae MGH 48
MNKIARFLLTASSIAPVGITLIFIGYMKNKPWLIWWSLGICLASFIAVIFFLHYANKNLPSLYKNVETISPANKEVTNYFLSYLFPLLGTDSIADKWQYAVFFYISLIVYICFSENYNFNPLISALGFKFYEAEDDTGVGFVLISKEVITNLKNRDFEVIQLTDYTFMHVTRE

SEQ ID NO: 94155 - protein, 284 aa, Klebsiella pneumoniae MGH 48
MMNKNSAVKVYRIDTDRQTDIKIKKIFDDQLSLFESHHNTELVFEAGYTPSYNECSYIDNFDEGKILLDAVQRSTAMPLWTKNVGLNDITAFFMAPAYPQVKDKIAIQTFSKKQILNESRYLWLSKNSFTMSDLLGFNLDDKLVAILEGDKIKFRNFNNLRSIFDMSSYFAEATKQEISDFVNQPVFNIPVGFDLPALADNVIRKKVTLINKSKILVNHTVTEIKNAALTLNFPIKTTGSGNSEKIEMPTNKKEIKELLNFLDEDYFNSEITKQRFRSNSKRKA

SEQ ID NO: 94156 - protein, 173 aa, Klebsiella pneumoniae MGH 44; identical to SEQ ID NO: 93860

SEQ ID NO: 94157 - protein, 289 aa, Klebsiella pneumoniae MGH 44; identical to SEQ ID NO: 94027

SEQ ID NO: 94158 - protein, 172 aa, Enterobacter sp. MGH 25
MNKLARLLLTASSIAPVCATLFFIGYVKDSIWLMQYSLCVGILSWLLAIGLIKYAENRLELLTKNISSVSPANKEVTNYFLSYLFPLLGTDSIAENKAYALFFYLSLLFYISFSENYNFNPVLSLIGYKFYEAEDDTGVGFVLISKSVITDIKDIPFTVVQLTDYTFLHIKG

SEQ ID NO: 94159 - protein, 294 aa, Enterobacter sp. MGH 25
MALFAVMDNTIATRIVRVELDRTASSSVTAIFQQQCQHFESHHNNKIPFYAGYTPKYDECFEIQNFTDSASLVDAVRRPTAIPIWDPNQIAIDNIKALFVGVVNQANSNVIALQPFNKKQILDTSKSFFGKFVASKTTFSKADSIGFNVDDKLVAVIDNNTIHFKSFFKLRSIFDMTSYFSAATDQELTTFSQLSVFSTPPGFDLKIIADTVIRNKVTLINQSGMLTAQNLSLFKVEAAKVNFPLQTNVINGVEKIIMPSSKKEIKALLDFIEEDIWVSGISGRRFKSSSKRPI

SEQ ID NO: 94160 - protein, 200 aa, Enterobacter sp. MGH 23
MTPRLPFAFAVFLGSYLPLSMILLIQDFDDSKYKRHLCFDLLTSDSCNLPFKEPLLSVSLFLICLVCFLLSWLILKLAKSDEQKIRILEVKYTPSDLMNYVLPYIVSFMSINYQETNKFLGFIVFLLWLFWLSYKTGQIILNPILIVFNWKMYEVTYRHPGSKKTHSGVVLSNLSISPDSDYEYQTIQSVIIISGDKDET

SEQ ID NO: 94161 - protein, 304 aa, Enterobacter sp. MGH 23
MKLKELQDFDIQSATLSVWVFRKQTVKSNSVYRGKWITVVPELKTELTEFICAERGKYTETIEYSLLAQNNEASLMLIGSGETSAVAITALSADQTQARKVKEIKELANCDFYSVKLVSGDTVLHCVKKTDPSWATKKQSGLRSVVFKNNKLKIDDTPRFNIAKDFDFYILGDNVFIKNKKTFESLLSYKKAHLTNFNDLVDEPEFSQLFTDAEPLKRYVGTNAMQLRRASAIKEKGFYKLPEFMASLREHASRFRLNLQFDEQGRIIASDACCADIFQALLDHRLQSHFAAHIYDVPNASPIQ

SEQ ID NO: 94162 - protein, 197 aa, Enterobacter sp. MGH 23; identical to SEQ ID NO: 93954

SEQ ID NO: 94163 - protein, 323 aa, Enterobacter sp. MGH 23; identical to SEQ ID NO: 94023

SEQ ID NO: 94164 - protein, 196 aa, Klebsiella pneumoniae MGH 20
MKSKGTFNKIGLYILSLMLLFVFIIILSAKIPICYGDSCEFIGFYKLAIDNVIPIICFFFIFLACYFYKRFRSLIKINNADTVTITSCQSENYESLTFLATYIVPFMGFSFDDIQKNIAYLLLVIVIGLIFIKTDKYYANPTLAIFGYKLYRVNISYTGSVEVKNVIAISTDILAVNDQVFYSFLDDYVFIARKKQ

SEQ ID NO: 94165 - protein, 319 aa, Klebsiella pneumoniae MGH 20
MTPEILKREVSDILDNFTGIRIIFVVKIEDSYSLKLSKIEAEALPKIVEGFKRKIEEDILDNDDLTIPFLSNFDDRKNALFKFDYEEQPKEFGFIKSATAIPPNSQDFYDLRNKFTDVKGIIIQLRGNNKCLSLYKNKTNLTVFEQSRKLFNLIPDSDGYLKELPNQVFRLDYNYDLVLLDNDFLIKNQKTLEVTMQFHQVIEAQATVALESLRSSSLIDDLSHLEKSAKEISFSRKLAKISKHSPVLGKIDVPVIIHYVSHHTYLSTVLIVSEDGRKLIIKTKESQKHFIKLLSDDYLESPLTKILYDSLAKDELKTN

SEQ ID NO: 94166 - protein, 177 aa, Asticcacaulis sp. YBE204
MLSKLAKLMLTGTSLAPVALVYAWVVYTDGKSLVALALVALAIVLIVIMVSLLRYCRKHLERSKFKVTSIEAADREYITFILLYLSPLFTAQFGDLNWHILIPTMIIFILVISTGYGYHFNPLLGLLGWHFYKVNTDEGVAYVLITKMELRSARQCLTVGQLTEYIVIDLSDNGRSA

SEQ ID NO: 94167 - protein, 286 aa, Asticcacaulis sp. YBE204
MTLLAYCKTNNGNAVKRIPMTNPVQNGLEALFLNQENAFRAGRPNEVAFDGDWNPDEDELLTLVVSQEVANIIAVATGNALALPVIDTAHFEAENIRALFTVAGNDGAQRLLVQRFTGMQLLNRKRALLLHENNFRELTEPAFTLGASLCCVVENGLIKFDSYHNLRAIFELTEFYQEATDADIDAIAAHASINIAHLAAFKEEATQTLRKLIHKVMYSGVLDQHTSQEIQTRAAATGLALVLDNGILQVPEDKALARQFFRFLDDSLYEAPLSGQRYVTNSKRAI

SEQ ID NO: 94168 - protein, 193 aa, Methyloglobulus morosus KoM1
MQFRTVSAFLVFIGSYLPLAIILAVQDIPSTWWSLPFCNFINLDIANCSFIPFKNPKPSLIFVCTCTLSVVVSSFLFRKISFPFVVDVQEFKAIPNDIINYTFPYVVSFMGISYDETEKLFGFGVFLLWMFAITYKSGQIIMNPLLLMFGWKLYEATVLINGVTRHIQILKQGSITRGSLDVQTIQDFYVARD

SEQ ID NO: 94169 - protein, 304 aa, Methyloglobulus morosus KoM1
MQAEFDSFRSFDFQNANVHLWVFKKSSSARKYTAHFVRTDQQLIELLKNLVINELNRIIEFSAYTYLAETNENSCLAAPTDETDFDYLKVQVDRPEPECEVRGIKNLKGAEGYLVKFTVNNETIYAVKRSTSTWKTSYPKKFINIVFRDGELAATNDNAFSIEKNFDFYCKGALLFIANKRGFESALEHRAAYIQNFADLQADPAFCSLFTDLQPLIGYVGSNSIQLRRMAIVEQKGIYSRPNFLTTLSQVSANRNWGINFDPHTNKIIACDHTAKTILQVLLDHRLMSEITSNVYDVPDATQI

SEQ ID NO: 94170 - protein, 200 aa, Escherichia coli ECA-727
MRDNSNKVKGYVRRKVDLYILSLAILFCFFIFITIKFPVCFGAKCEFIGWSLLLKNNIVPLICVGLLLYCGVAYKRFQYDTNKSVELPMKITKIEKINYEHLTFLATYIIPLITFDFEKERYVIVLAVLLIIMGIIYIKTDLFYANPSLALLGFNIYKLDVSITGGINKTGLILITRRQLKENDMISYIVLDERVYYSGD

SEQ ID NO: 94171 - protein, 171 aa, Escherichia coli ECA-727
  MOD_RES (167)..(167): Any amino acid
MSPQQLDKKGLDDNLSYYINNKDDISVIVYAILKNSPVAYRMDIEGSAQDGLKELFLESIKNNIIDNDDISILPLSSADERNNVIYHYDIEWPDELTSMQSMLGQQGESVFDFNVQNIEDIRVLLICIGNVQQQIILYKTMAPVNIFSRLGFFLKKSATRLEEIEDXFFSS

SEQ ID NO: 94172 - protein, 214 aa, Escherichia coli ECC-Z
MKYISYDRNSFMMGVINMRNSGGGMIFRKINLYILSLSLLFFFFIVITIDIPICFGDKCKFIGFEKLISNNVVAIICALLFLYSIVAYFKFKYDIKQSTEIPFEVVKVEGINYEHLTFLATYVIPLITFDFEKTKYIIVLAMLLVVMGIIYIKTDLFYANPSLALMGFHIYKLDGVFKGGEKRDGIIVITRKKIKMGDSVKYIKLDDRVYYSGY

SEQ ID NO: 94173 - protein, 331 aa, Escherichia coli ECC-Z
MPDIIYDKETLDRKFQYFIDNQAQLGIVVYALTRNSNTPKKMDIDPDAQRGLISLFMDNIRDNVVSNEELSILQLSASDERVKVIYQYDLEIPEELRVLDEVRQTDDHELYNIATEGVNNIKVLLIEIGDAREQMVLYKTMAPVNIFSRRNFFLKKSRTRFEKIDDDFFRISDNFQLLRFSDGLFVFDLDTIEKSFGFHEVIIREATSGMAAIEARNIVSNIEALAELIQDVRYARKLTKVARASPVIQRGIETAKIIIFCKNYPMLKGKIRFTEDGTQILLDTKVSKDLFIKLLMDDFLISELTESYYNSIAKDTVEVAVVRANAENSPA

SEQ ID NO: 94174 - protein, 173 aa, Mesorhizobium sp. L2C054A000
MFNVFARLVFTSTALAPVGLTYAWVAWVECAPQTAKFILTGCLILCVLCVGILWSAKRSLPASKFKAASIEAADHENTAFLLLYVMPLFTSQFNTLDWKFWVPTVAIFGVITATGYNYHFNPLLGLLGWHFYKVQSAEGVTFVLITKKHLRTAATELQVGQLTEYILLDLGGK

SEQ ID NO: 94175 - protein, 289 aa, Mesorhizobium sp. L2C054A000
MTQLYAVCRPAEIAEVRHIQLANPLQAQLNGVFENQEAQFMAGIANEIAFTGDWIPDSEDVLFIQSLPEAQALLAAADQNAVALPVLDVANFQDQSVKGLFAVLGNGPNRRLLIQNFGPQQVLSNRFAFLYEGDVFRRLVEPAFSLDNKLVATVDAIGLVRFKSYSMLRRVLDMSPVFRDATDPELAAFCGHASLAIGDAAAFVAGADEGIRKHVLAITKTNVLGNHPVANIQAQAVAIGFPIAVNAGRIEIPADRKGAKALFSFLLNKVYLGPIDQQLFITNSNRPLA

SEQ ID NO: 94176 - protein, 173 aa, Mesorhizobium sp. L2C089B000
MFNVFARLVFTSTALAPVGLTYAWVAWVECAPQTAKFILTGCLILCVLCVGILWTAKRSLPASKFKAASIEAADHENTAFLLLYVMPLFTSQFNTLDWKFWVPTVAIFGVITATGYNYHFNPLLGLLGWHFYKVQSAEGVTFVLITKKHLRTAATELQVGQLTEYILLDLGGK

SEQ ID NO: 94177 - protein, 289 aa, Mesorhizobium sp. L2C089B000; identical to SEQ ID NO: 94175

SEQ ID NO: 94178 - protein, 173 aa, Mesorhizobium sp. LSHC416B00; identical to SEQ ID NO: 94174

SEQ ID NO: 94179 - protein, 289 aa, Mesorhizobium sp. LSHC416B00; identical to SEQ ID NO: 94175

SEQ ID NO: 94180 - protein, 173 aa, Mesorhizobium sp. LSHC424B00; identical to SEQ ID NO: 94174

SEQ ID NO: 94181 - protein, 289 aa, Mesorhizobium sp. LSHC424B00; identical to SEQ ID NO: 94175

SEQ ID NO: 94182 - protein, 173 aa, Mesorhizobium sp. LSHC426A00; identical to SEQ ID NO: 94174

SEQ ID NO: 94183 - protein, 289 aa, Mesorhizobium sp. LSHC426A00; identical to SEQ ID NO: 94175

SEQ ID NO: 94184 - protein, 173 aa, Mesorhizobium sp. LSHC422A00; identical to SEQ ID NO: 94174

SEQ ID NO: 94185 - protein, 289 aa, Mesorhizobium sp. LSHC422A00; identical to SEQ ID NO: 94175

SEQ ID NO: 94186 - protein, 204 aa, Escherichia coli UMEA 3489-1; identical to SEQ ID NO: 93768

SEQ ID NO: 94187 - protein, 340 aa, Escherichia coli UMEA 3489-1; identical to SEQ ID NO: 93953

SEQ ID NO: 94188 - protein, 196 aa, Prevotella oralis CC98A
MVSFVPKFLFTATVTAPVFLSLGLIGIIKDSKNYFQSWNNLLENNIIPNSFEWWSINISFAFMLICLIDIKIFLRKKSCKCGKGKTIKVQSYSNLSQNSAEQVISSIIPWLTIFAERLDFIVLFVCIILQCCFIAIASYNNNNYNLLCSIWGYRYYEVKTEENTYILISKKCIRNKNEIKIFVEVTDYMGLIINDK

SEQ ID NO: 94189 - protein, 173 aa, Prevotella oralis CC98A
MLQRKMVLQFEHGNVFTKMNNTAFIVEDKVHAIYEDGKLYFQNYTIANQIFSLIDFITEATNTEIESFGEIEGINVSTENIKHIANIKTRRLIKLLSNTDNIATFMRKASQTRTSLLRKYGVNAQINENNELVLPTNNVADLNRVLEFLNEDIFRGVITDSLYRSNSKKKDNH

SEQ ID NO: 94190 - protein, 190 aa, Escherichia coli DORA_B_14; identical to SEQ ID NO: 93770

SEQ ID NO: 94191 - protein, 297 aa, Escherichia coli DORA_B_14; identical to SEQ ID NO: 93927

SEQ ID NO: 94192 - protein, 194 aa, Enterococcus faecalis DORA_14; identical to SEQ ID NO: 93746

SEQ ID NO: 94193 - protein, 304 aa, Enterococcus faecalis DORA_14; identical to SEQ ID NO: 93727

SEQ ID NO: 94194 - protein, 215 aa, Photobacterium leiognathi lrivu.4.1
MKIRMYLLSMLFLFIPITIYFSGIDNVWSIFDKAMSSCSGMDNISQCVYNYSNSRLTFSTWRLVICGALILTCSYTYIWYLMILKNLEAGIVSKKLKVVSCKKESGEYLSFLSTYIMPLVFTDLSKPSNIVNFLFVLIIVGFLHIKTKRIHCNPTLSLFNVSAYKITYSVIANGKEKTQDKELIVLSKDLIRENDFIRVINHDDYLTFAKKIIEE

SEQ ID NO: 94195 - protein, 378 aa, Photobacterium leiognathi lrivu.4.1
MSADALDLDTLEHNKEKAQELLELYKHFDCHVDKVTLHTYFNFKNKSKPGGKDTFSYKIASLKNDTELKQSIIDNVIKKTISDIESQVVMVSDINALSDRANTISFLNNAEQYDNEQMKFLTGIVFDAGFGGDGEDDIPVVNFDTVDQIAKVDSIIFVLSKDDDDQCITIYKKQYPIQNLSRKKNNFYGFSKTELTRVDKDMISIDGKASLVFSGDTVFIYDQNVFERFFGYKAWIKNAASEFVDSMSSRFDSFVDLSKFTERVDKDSHDADAFSRKLAKVYARNETKQTLQTITNKHLQRVLDENEYLAGVFKYKKGNDTIRIETHNQQDTFIAMVSEGVLRSLITGIDYLSLGSKRKIPSATSTARTTSDSSSVVA

SEQ ID NO: 94196 - protein, 197 aa, Gluconobacter frateurii NBRC 103465
MQLKKTSAFALYIGSYLPLGFILFVQDLDPEALKAGLCRPSNWSIKSFHFPLLHPWWSFGTVGLGIICFLVTLWTLRSVTTPNRIQVVEAKHIPADLINYAMPYIVSFMGIDFASPMKMLGFAVFFLWIFWITYRSGQIIMNPILIVFGWKLFEIKYNFVQSGDQLIGRALSREDIEPNRMYRRGSLQDVMIVDGVE

SEQ ID NO: 94197 - protein, 309 aa, Gluconobacter frateurii NBRC 103465
MERLVPVLDDLKSFNLVEADLTIWVYKKSTRDGNPVFNGRWVGITQNLSDTLRGAVSQALENVNETIEYDILAQNHETSVLTLGADETHIGLIEGQAANPTEARKVTRLEQIANAEFYMLRFASDAGVLLAVRKTNATWKTRRSCNALRAVFQDEELDIDTRPAFSLEPFFDFFVFDGDVFVSNKARFESVLAYRAGHTEAFHDLVNQSEFSDIFSEVTTIAEFVGTNKIQLRRAIAIREKGHFRDPNFMEKLRTHCAEMGLNIDFDDEGRIVPKPESCRDIFQALLDHRLDSRLSQRLYDVQSTEQVG

SEQ ID NO: 94198 - protein, 171 aa, Enterobacter cloacae P101
MLNSSAKYLLTASSVAPVCFTLSFVAVVNKHYPFAAFSLGIAMMSFFFCWFIIKLIRKHISVTHVNLRSVKPANKEITNYFLAYLFPLITDDKLISDWYLACFFYISLFFYVGFSGSYSFNPLLTLLGYKFYEAEDDTLVSFVLISKRKIQYGHIDDLKVVQVTDYTYLII

SEQ ID NO: 94199 - protein, 289 aa, Enterobacter cloacae P101
MHLFALTDEDLSPNIYKIDVDKKTSDILKKAFSDMEVDFNNTHNETISFTADYKLEKNEFFILDDFKEHGALKKALKTPKAVPNLHIDRVPLNKIKALFTGSTDGNKIVIQRFDNRQVLTPSTMLFLDSKETFTHTSYGGISIGAKITALIHNDIITFGNFNSLRRVFNMDKYFREATDPELDSFQENGVFAIEDGFKLSSFDDTTIRRKVTLLNQSGILGVDNIPALIAAAQELKHPLDIIETSTGARISMPIEKRKVKLLLNFLDSDIYISAVNGKKYRSNSKRQID

SEQ ID NO: 94200 - protein, 172 aa, Serratia marcescens subsp. marcescens Db11
MNKLARLLLTASSIAPVCITLIFIGWATDSTWLVKYSLFTALVSWILCIGLVKFAESKLETLHKNIESLSPANKEVTNYFLSYLFPLLGTDSIAEKKEYAIFFYVSLLFYICFSENYNFNPVLSLHGYKFYEAEDDTGVGFVLISKEVITDIKGKKFPVVKLTDYTFLHVTR

SEQ ID NO: 94201 - protein, 295 aa, Serratia marcescens subsp. marcescens Db11
MALFALMDSNVATKILRIELDSNASSMINTIFNDQKLHFESHHSTVIDFYAGYTPSYNECFKLSNFNESAALIDAVTRNTAIPVWDPKVIDVNHIKALFVGIASSQNNNLIAIQTFNKKQILDTSKSFVMKLIGSANTFSKADNVGFNLDDKLVAIINGSDIFFRSFFKLRSIFDMSNYFAEATDKEVNDFAMHSVFEVPLGFKLDTVADTVIRTKVTLINKSGTLNNQTISKLKMAAKKINFPLQTNLTGGVEKIVMPQEKKAIKALLDFLDEDIFTSEITQTIYKSNSKRKYS

SEQ ID NO: 94202 - protein, 189 aa, Paenibacillus sp. FSL R7-277
MRDKIELYIISLWLLFVLIIIATINIPISFNKNAQFIGFKKLFEMNFVPLLSLLFLLLGLAFISRFKYKLSGSLKTFRVNEVQNGSFEHLTFLTTYIVPLISFNLDESRNILILLILLLAIGAISIKTQIFYANPTLALLGFHIYIISGTFRTGVRQGIIVISRDKLNSGSTVKYRRLDEKIYFARLMP

SEQ ID NO: 94203 - protein, 323 aa, Paenibacillus sp. FSL R7-277
MIKADLITLLRETLTNEELIIAELYFVLKQAQNMTLRLIDIDEETQGDLTKQFIEKIKADLIEDETLDLVSISNSDERERVIYEYDLDEVPEEIKLINAIIEDEDILAFDFKKDELNQIRGIVVLISNNNHNLLLYKKHYPVSLIKKDNTFTFKRIGNHKRFVNVEEDLIRINTNFEFFMIDGSLIIKDLKTLEKFFGFHEIIKKKAQECIVAIEQSGLLEDSNVLQELIDDISYSRKLTKVLSSSPVLNKIPTPSIIAFTDIYPALKGQFQYNTDKSKIMLSTKKAKLLFAKLLNDDFLQSELTKMFYDSLAKDTILETASS

SEQ ID NO: 94204 - protein, 159 aa, Chryseobacterium indologenes NBRC 14944
MNFGGFSQESVFLALAKFGLSVFLFLTAIFGYIGLKFLLINLDIKKSNGELVKVVEVENKNSESISYISTYIVPFIFQDTNNLFDITSIFIVLIIIFFIYTKSNMIVINPILSITHTLYQIDYNKKSQTKKALLITKDEDLESGQEIKINLITKNIYYG

SEQ ID NO: 94205 - protein, 339 aa, Chryseobacterium indologenes NBRC 14944; identical to SEQ ID NO: 93721

SEQ ID NO: 94206 - protein, 204 aa, Escherichia coli BWH 40; identical to SEQ ID NO: 93768

SEQ ID NO: 94207 - protein, 340 aa, Escherichia coli BWH 40; identical to SEQ ID NO: 94081

SEQ ID NO: 94208 - protein, 195 aa, Methylophilaceae bacterium 11
MQLRVISAAVIYIGSYLPLSVILLCQNFDKDIYNLGFCNPWIIFATECKLPLKNPIFATSFLIACTFCFFIAIFTLYKVDPKKNINIIESKPVPADLMNYVLPYIVSFMSLDYQDTSKFVGFTIFILWIFWITYKSGLIILNPLFVAFGWRLYEIKYSFAGSGDEFYATALSKIELSPKQNCAQETIQDVLIIKK

SEQ ID NO: 94209 - protein, 311 aa, Methylophilaceae bacterium 11
MSADLDLLKGFDLANATLMLWIFKKSSSNKDPNTPVFTGRWVDTSENLITPIKQAISVALNQVTEVLDYDIMAQNNEASALSIPKLETHADIIVQQAANETDNKKITKIEKIANADFYSIKLVHNNTVIHCVRKTDDSWKTKKSVGIISALFSDEGLELEVKPSFNISKNFDFFIVNDSVLIQSKQNFESLLSYKEAHIQDFSSMQADPAFAGVFSDMSHVINYVGNNKMQLRRASAIKQKGFYKNPAFIDSLRKNYQAFGLNISFDQNGKIVPTPDSCADIFQALLDYRVKSHFSQNIYNVQSTVLINIT

SEQ ID NO: 94210 - protein, 190 aa, Enterobacter aerogenes UCI 15
MTTDFMYTGFLYSYGGWCMLNGFARYALTASSVAPVCLTLAFLAYINDNYKILVSSILLAVISVVFCVFIIKQAQKYNPVTLKNLESASPADKEITNYFLTYLFPLISGPTTFMDWRLALFFYLSLFFYIKHSSSYSFNPILSIIFGFKFYEAEDDTGVSFVLLSTKPLTNAKIKGLRVKKLTEHTYMIV

SEQ ID NO: 94211 - protein, 297 aa, Enterobacter aerogenes UCI 15; identical to SEQ ID NO: 94045

SEQ ID NO: 94212 - protein, 190 aa, Enterobacter sp. BIDMC 27; identical to SEQ ID NO: 93770

SEQ ID NO: 94213 - protein, 297 aa, Enterobacter sp. BIDMC 27; identical to SEQ ID NO: 93927

SEQ ID NO: 94214 - protein, 172 aa, Enterobacter sp. BIDMC 26
MNRLARLLLTASSIAPVCVTLIFIGFMKHNTWLIYTSLVTAVVSWILCLTLVTVAEKKFEILSKNIDSVSPANKEVTNYFLSYLFPLLGTDSIATVKEYAIFFYVSLLLYISFSENYNFNPVLALHGYKFYEAEDDTGVGFVLISKEIITNIKDINFKVVKLTEHTFLHVKG

SEQ ID NO: 94215 - protein, 295 aa, Enterobacter sp. BIDMC 26
MPLFAIMDNQSAIKIVRIKLDRAASTMINETFNQQRQYFEAHHDSVIPFYAGYNPSYNESFELENFHDSNLLMDAVRRNTAIPEWKPEEINIDHIKGLFVGVGEPNAENCIALQTFNKKQILDTSKSFVMSLVGAANTFSKAEKVGFNIDDKLVAIIKNDKIYFRSFFKLRSIFDMTVYFQEATDQDLALFSSNAAFSIPEGLDLSVIADTPIRNKITLINKSGILDAELLPVLKSAAEKIGFPLKIKNIEGQERIEMPQTKREIKALLDFLDEDIFTSEISQKVFKSNSKRPYA

SEQ ID NO: 94216 - protein, 172 aa, Enterobacter sp. MGH 37; identical to SEQ ID NO: 94158

SEQ ID NO: 94217 - protein, 294 aa, Enterobacter sp. MGH 37; identical to SEQ ID NO: 94159

SEQ ID NO: 94218 - protein, 200 aa, Enterobacter sp. MGH 15
MKNDSKETKEYVRRKIDLYILSLAILFCFFIFITLRFPVCFGAKCEFIGWSLLLKNNVVPLVCLGLLIYCWIAYRRFKYDTNKTVELPLKIIKIEKINYEHLTFLATYIIPLITFDFEKERYVIVLAVLLIIMGVIYIKTDLFYANPSLALLGFNIYKLDVSITGGINKTGLILITRRQLKENDMVSYIVLDERVYYSGD

SEQ ID NO: 94219 - protein, 318 aa, Enterobacter sp. MGH 15
MSPQQMDKKDLDDNLSYYINNKDDVSVIIYAILKSSPDAYRMDIEASAQDSLKELFLDSIKNNIIDDGDLSVLPLSSADERNNVIYQYDIGWPDELTSMQNMLGQPGEAVFDFKTQQIEDIRVLLVCIGNADQQIVLYKTMAPVNIFSRTGFFLKKSATRLEEIKDDFFRVSDNFQIIKVENDLYVVDLKLIEKMFGFHEVIKKEATLGMTAIEGMNIITDIEVIKELIDDIKYARKLTRIAKSSPVILAKIENEKIIEFCKTYPVLINRIRFNEDGTKIALDTKVSKDLFIKILMDDFLTSQLTQFYYESLAKDAVK

SEQ ID NO: 94220 - protein, 200 aa, Enterobacter sp. MGH 10; identical to SEQ ID NO: 94218

SEQ ID NO: 94221 - protein, 161 aa, Enterobacter sp. MGH 10
MSPQQMDKKDLDDNLSYYINNKDDVSVIIYAILKSSPDAYRMDIEASAQDSLKELFLDSIKNNIIDDGDLSVLPLSSADERNNVIYQYDIGWPDELTSMQNMLGQPGEAVFDFKTQQIEDIRVLLVCIGNADQQIVLYKTMAPVNIFSRTGFFLKKISYKT

SEQ ID NO: 94222 - protein, 173 aa, Klebsiella pneumoniae NB60; identical to SEQ ID NO: 93860

SEQ ID NO: 94223 - protein, 289 aa, Klebsiella pneumoniae NB60
MSLFAMMNKNSAVKVYRIDTDRQTDIKIKKIFDDQLSLFESHHNTELVFEAGYTPNYNECSYIDNFDEGKILLDAVQRSTAMPLWTKNVGLNDITAFFMAPAYPQVKDKIAIQTFSKKQILNESRYLWLSKNSFTMSDLLGFNLDDKLVAILEGDKIKFRNFNNLRSIFDMSSYFAEATKQEISDFVNQPVFNIPVGFDLPALADNVIRKKVTLINKSKILVNHTVTEIKNAALTLNFPIKTTGSGSSEKIEMPTNKKEIKELLNFLDEDYFNSEITKQRFRSNSKRKA

SEQ ID NO: 94224 - protein, 180 aa, Burkholderia thailandensis E444
MLSRLVRVLLALTAIAPLSISLAFQFARSKNYLWAGGAFALCLCLGLLARLIISLASSRLEPLSAKILKAKSADKEVIGFFVAYALPMIFRGQPASPDLTAWLFAAGMLLFVLWGTQSTQVNPVLGVLGFHFYEVETDGGITYLMITRRRINNVLTIKKIVQLSEFGILEAGDSAQGKEK

SEQ ID NO: 94225 - protein, 288 aa, Burkholderia thailandensis E444
MNLFALSRGEEQPPILRIPLTAELRREVARAFVDQLAAFESGVEHVLPFDGRYMPEDDEAIVINQFQDVDGIIDAIERPMRVELFDSRQHSLENVKALFLGHRRNGHQAALIQSFERRRLISKKTLSMLFSGDTFQRIQEDGLTLDSHLLAVLENGAITFKSFHFLRRVFDLSEHYREATNEEVEAFVAHDNIMVEDAEAFVAAAGPLIRKKISFISQSGILDSHTGRQIANAARQFNLQVRIDGDDRIVLPTDKAELRKLLKFLDEDYYESALSKSHFVSNSKRPAD

SEQ ID NO: 94226 - protein, 200 aa, Enterobacter sp. DC4
MTPRLPFAFAVFLGSYLPLSMILLIQDFDDSKYKRHLCFDLLTSDSCNLPFKEPLLSVSLFLICLVCFLLSWLILKLAKSDEQKIRILEVKYTPSDLMNYVLPYIVSFMSINYQETNKFFGFIVFLLWLFWLSYKTGQIILNPILIVFNWKMYEVTYRHPGSKNTHSGVVLSNLSISPDSDYEYQTIQSVIIISGDKDET

SEQ ID NO: 94227 - protein, 304 aa, Enterobacter sp. DC4
MKLKELQDFDIQSATLSVWVFRKQTVKSNPVYRGKWITVVPELKTELTEFICAERGKYTETIEYSLLAQNNEASLMLIGSGETSAVAITALSADQAQARKVKEIKELANCDFYSVKLVSGDTVLHCVKKTDPSWATKKQSGLRSVVFKNNKLKIDDTPRFNIAKDFDFYILGDNVFIKNKKTFESLLSYKKAHLTNFNDLVDEPEFSQLFTDAGPLKRYVGTNAMQLRRASAIKEKGFYKLPEFMASLREHASRFRLNLQFDEQGRIIASDACCADIFQALLDHRLQSHFAAHIYDVPNASPIQ

SEQ ID NO: 94228 - protein, 200 aa, Enterobacter sp. DC3; identical to SEQ ID NO: 94226

SEQ ID NO: 94229 - protein, 304 aa, Enterobacter sp. DC3; identical to SEQ ID NO: 94227

SEQ ID NO: 94230 - protein, 156 aa, Gluconobacter thailandicus NBRC 3257; identical to SEQ ID NO: 93942

SEQ ID NO: 94231 - protein, 278 aa, Gluconobacter thailandicus NBRC 3257; identical to SEQ ID NO: 93943

SEQ ID NO: 94232 - protein, 190 aa, Acinetobacter baumannii 4749; identical to SEQ ID NO: 94032

SEQ ID NO: 94233 - protein, 328 aa, Acinetobacter baumannii 4749; identical to SEQ ID NO: 94033

SEQ ID NO: 94234 - protein, 171 aa, Candidatus Accumulibacter sp. SK-02
MLRFLPKLLLVATSFAPVMVTFAVVLWFDSERSLALGLLAGAVLAVIACVTVIKLAARQLSINDVVIKSIKPADKEIVGFVLAYLLPLARGSQFDGVPMFVVLGVFFLVVMTSNAYHTNPLLGLIGYHFYEVTIEDVGYTLLSRRNLHNTKAIKSVVSLTDYMLLDVTKQK

SEQ ID NO: 94235 - protein, 289 aa, Candidatus Accumulibacter sp. SK-02
MNPILLTKDEERPFLRLDLDQSAASGARDLFLSAADSFGRGIEQVVEFDPGYKLHDDECFEIHDFPISEDLIGFCRQPLSAERVDSADFAALPINGIVGYDFSAGQRKLYFQNFDSRRVLIPGRRFAILPMADASTFKQLTKPVLLLDANITAVWNDGVLRFKSFHLAKQLFDLSTYFTEATDEQIGTFVAHARLKCSDSSKFMGACNTWSRTKIALILRGGILDHATGDMIRDAAASVEYEIQMDRDRIVLPEEKGALRSLLQFLDEDIYRGPISQRRLLSSGKRQIE

SEQ ID NO: 94236 - protein, 198 aa, Ochrobactrum anthropi
MQFRVIPAFVVFLGSYLPLSLILLAQNFDYAFVGRPPCWRIWEDGCSIPLKNPAFAIGIFLACLICFALTLWALAAVKPKNEIIVQEARHVPADLMNYTLPYVVSFMSIDYQDFGKYIGVIIFLGWMFWISYKSGQIILNPVLIVFGWKLYDISYNHAASKQVHSANVLAQGAITPGARYRQAPVQDILIIKPSAGGD

SEQ ID NO: 94237 - protein, 306 aa, Ochrobactrum anthropi
MPLPQSLADFNIEESTVSVWLFKKSVTADGLPRFSGRHVNTDEELDGALKEALTEARASIQDVTPYTLLAAAQDGIALGIDALETHADAITAQMADPLAEKKVRSLKDVQNTKFYVVKLTHADNAIHAVRSTDNSWQSRKTRSAISVIFKDEQLGLNEEPAFSISRHVDFFIAGDDIVMLSKPSFEKVLSYKQAHAEDFVALQAEPAFAAVFSDVAPLVTFVGQNKIHLRRACVIRQKGHYMDAQFMQRLRDNFARCGLNLVFAADGRLVATPETCADIIRALLDHRLSSFFSEQHYDVPDATAVA

SEQ ID NO: 94238 - protein, 202 aa, Bacteroides fragilis str. S24L26
MGYKNNDLKKGAKFALFVSSYLPLFILVILRQLSDNYNYLHWGGISINSIKIFLSFFGLSSVLTLVSILGIIGLYNTLKNIEDISENGFNAQIIDIKNKNSESIGYIATYIIPFLFQSLNGWYEGISILFLMGIIYRIYINSSMILINPILSCKYSIYDIEYSKNKKIKNGFIISKDNSLQDEDKIKLYEIGNKLFFAINKE

SEQ ID NO: 94239 - protein, 343 aa, Bacteroides fragilis str. S24L26; identical to SEQ ID NO: 93823

SEQ ID NO: 94240 - protein, 202 aa, Bacteroides fragilis str. S24L34; identical to SEQ ID NO: 94238

SEQ ID NO: 94241 - protein, 343 aa, Bacteroides fragilis str. S24L34; identical to SEQ ID NO: 93823

SEQ ID NO: 94242 - protein, 181 aa, Lysinibacillus varians
MTNLFKLFLFISSYSPLYVIVALSIFPYENIDWQSFSEDQVTFTVTIILVVLFSLSFLPIWYIRKCELNSTIVSERVARKNEEILSYLVTYIVPLLAINVKEISTLITNGILFMIIGYLYIKSNLIHVNITFLLFGWNIYEDELGRVIISKDNPDYFIRMNIANNPIRVRKLASNIYLHRS

SEQ ID NO: 94243 - protein, 305 aa, Lysinibacillus varians
MNIELINSKISERLLSGTFEVSLFLIEKIKTHDMLDYFSFQPSISHSLQKEIINIIQPTIDKLVGKEQLEFNENGRPNGVVEYCKSSYIGITYDHLFKSLQEPGESLNEDVQKDLYCIKIEIEAGKYAYFLNRIPQFKKFSKGLWGIIADTTFRKVSDSFIGIEPGFDLLIYDNEILVVNNVSVQRIFDLKTKYVHNTNSVLCAFEETNKLEGFEQFKNDSIEDGNIVKRVSRLMTKPERMTRFVENFDKIEEIIKEFDLNIELNEEKSKIKYTDKKQLNDIVKLLNDAYYKTVLTGERGRDDLR

SEQ ID NO: 94244 - protein, 171 aa, Escherichia coli 1-176-05_S3_C2; identical to SEQ ID NO: 93814

SEQ ID NO: 94245 - protein, 297 aa, Escherichia coli 1-176-05_S3_C2; identical to SEQ ID NO: 93815

SEQ ID NO: 94246 - protein, 109 aa, Escherichia coli O6:H16 str. 99-3165; identical to SEQ ID NO: 93876

SEQ ID NO: 94247 - protein, 335 aa, Escherichia coli O6:H16 str. 99-3165; identical to SEQ ID NO: 93879

SEQ ID NO: 94248 - protein, 171 aa, Escherichia coli O91:H21 str. 2009C-4646; identical to SEQ ID NO: 93814

SEQ ID NO: 94249 - protein, 297 aa, Escherichia coli O91:H21 str. 2009C-4646; identical to SEQ ID NO: 93815

SEQ ID NO: 94250 - protein, 169 aa, Aeromonas hydrophila AL09-71; identical to SEQ ID NO: 94018

SEQ ID NO: 94251 - protein, 295 aa, Aeromonas hydrophila AL09-71; identical to SEQ ID NO: 94019

SEQ ID NO: 94252 - protein, 169 aa, Aeromonas hydrophila pc104A; identical to SEQ ID NO: 94018

SEQ ID NO: 94253 - protein, 295 aa, Aeromonas hydrophila pc104A; identical to SEQ ID NO: 94019

SEQ ID NO: 94254 - protein, 189 aa, Enterococcus faecalis MD6; identical to SEQ ID NO: 94016

SEQ ID NO: 94255 - protein, 314 aa, Enterococcus faecalis MD6; identical to SEQ ID NO: 94017

SEQ ID NO: 94256 - protein, 182 aa, Bordetella hinzii 1277
MLFLSAYSPLMLILIIKDYDATSPGLLPQNPVFSGILLLIAVFSSLAVLRSVREIDGGLTVTVTKASNKSGDMFGYTIPYMLSFMKVDLGDWQVIVSLALFLAILFIMAYRTQTVFVNPILALAGYMLIDCTFKRGDKEIQAMVVTRQPLAVGDTCRMERMSHYLYVAVKDNANLDKKGTEK

SEQ ID NO: 94257 - protein, 312 aa, Bordetella hinzii 1277
MSNKAHKATLKAIKAIDLKKWVVTFWLVKRYMANHAAHYSVLRVNTDAKLQKRLKGYVVNQLQGKDFHLAEYDFNNADGDDTLFTITADATDFPKVEVAINAGFDNAIAKEYQDLLNSWAYVVQLEHGNDRLYAWRKISTLTQPKKVQSRQATFFVEHKLVDVEDKEVFLIDPRFDFFVHGGMIFIANKKEFEISMNFREGMKAKAAEVIQNFNESGRFKNVDLIQKHVGDNLHHLRKMASILKAGYYQQPDYIQRMIEVSKEEGWELKVEDGQVVVEAETIDVLLKLLNNDRLRSPINNEIFDAAAKAPVK

SEQ ID NO: 94258 - protein, 189 aa, Lactobacillus animalis
MLEKIFKLSIYISAYIPIFMMIFLANLKSFSSKNISILWNKNPVLWWIFIVISILSLTPLLWWLYMLNRSYQTNSKEKIEINGADLKDADVLNFFVTFIVPILSLDPTSLPSIVMNFFLLLIEAIYVINNNTIYNNILLILMGYHIYTFSDDNVVITRIPKDEVIFENIGAKQVGATNIYYIGKQNKVN

SEQ ID NO: 94259 - protein, 306 aa, Lactobacillus animalis
MKLENMLDLLDEKEPRVNLFLVHKVNSKKRRSFSVANPEITMEFEKNLLDIIKSELRSYQDMRVVPYNIIGCNDNIVEMAKVSEYNAVDLLKESLKNPSQKFRFDTCGFDFFVYKVYFTDSDEELFFFRKSKNFKTFQKGFVGRFIEGRFKKLADTNKLLATDETIDFVLDDKDIYIFQHLSFERVFDLNSKFLVQAKMVLDRVGDLSKIESFDKLRKSAMGNGNYVKRLAKLNDGDNANTATLFLEDLVQTQKVINEFNLDIEIDTKNNKMKFKDESQTSSYISLMQDAYYETLIGKVKGIDERR

SEQ ID NO: 94260 - protein, 90 aa, Escherichia coli 2-005-03_S3_C2; identical to SEQ ID NO: 94144

SEQ ID NO: 94261 - protein, 335 aa, Escherichia coli 2-005-03_S3_C2; identical to SEQ ID NO: 93879

SEQ ID NO: 94262 - protein, 210 aa, Geobacillus sp. CAMR5420; identical to SEQ ID NO: 93692

SEQ ID NO: 94263 - protein, 321 aa, Geobacillus sp. CAMR5420; identical to SEQ ID NO: 93693

SEQ ID NO: 94264 - protein, 199 aa, Enterobacter cloacae BWH 43
MKRKSTFNKMGLYILSLMLLFVFIIILSAKIPFCYGSSCHFIGFYQLASSNIISIICVIFIGIAFYFYRRFKGLTKVNNADCVTITACQSESYESLTFLATYIVPFMGFSFDDPQKNLAYFLLIVVIGLIFIKTDKYYANPTLALFGYKLYRVNISYSGSSEVKNVIAISMDVLTVGDQVFYSFFDDYVFIARKKHESR

SEQ ID NO: 94265 - protein, 319 aa, Enterobacter cloacae BWH 43; identical to SEQ ID NO: 93941

SEQ ID NO: 94266 - protein, 204 aa, Escherichia coli BIDMC 77; identical to SEQ ID NO: 93768

SEQ ID NO: 94267 - protein, 340 aa, Escherichia coli BIDMC 77; identical to SEQ ID NO: 94081

SEQ ID NO: 94268 - protein, 139 aa, Escherichia coli UCI 66
MQYSLCVGIASWLLAIGLIQYAEKQLEPLTKNISSVSPANKEVTNYFLSYLFPLLGTDSIAENKAYALFFYLSLLFYISFSENYNFNPVLSLIGYKFYEAEDDTGVGFVLISKSVITDIKDIKFTVIQLTDYTFLHVKG

SEQ ID NO: 94269 - protein, 294 aa, Escherichia coli UCI 66; identical to SEQ ID NO: 93881

SEQ ID NO: 94270 - protein, 196 aa, Klebsiella pneumoniae BWH 48
MKSKGTFNKIGLYILSLMLLFVFIIILSAKIPMCYGDSCEFIGFYKLAIDNVIPIICFFFIFLACYFYKRFRSLIKINNADTVTITSCQSESYESLTFLATYIVPFMGFSFDDIQKNIAYLLLVIIIGLIFIKTDKYYANPTLALFGYKLYRVNVSYTGSVEVKNVIAISTDILAVNDKVFYSFLDDYVFIARKKQ

SEQ ID NO: 94271 - protein, 319 aa, Klebsiella pneumoniae BWH 48; identical to SEQ ID NO: 93875

SEQ ID NO: 94272 - protein, 185 aa, Klebsiella pneumoniae MGH 68; identical to SEQ ID NO: 94152

SEQ ID NO: 94273 - protein, 297 aa, Klebsiella pneumoniae MGH 68; identical to SEQ ID NO: 93927

SEQ ID NO: 94274 - protein, 196 aa, Klebsiella pneumoniae MGH 69; identical to SEQ ID NO: 94270

SEQ ID NO: 94275 - protein, 319 aa, Klebsiella pneumoniae MGH 69; identical to SEQ ID NO: 93875

SEQ ID NO: 94276 - protein, 185 aa, Klebsiella pneumoniae UCI 56; identical to SEQ ID NO: 94152

SEQ ID NO: 94277 - protein, 297 aa, Klebsiella pneumoniae UCI 56; identical to SEQ ID NO: 93927

SEQ ID NO: 94278 - protein, 185 aa, Klebsiella pneumoniae UCI 56; identical to SEQ ID NO: 94152

SEQ ID NO: 94279 - protein, 297 aa, Klebsiella pneumoniae UCI 56; identical to SEQ ID NO: 93927

SEQ ID NO: 94280 - protein, 172 aa, Gilliamella apicola
MPSKLLRILLTASSIAPVCFTVAFIGFINHNNTLLWLSLLIGLILCFLCIFVVFVYQRCGETLTKNISSLTPANKEITNYFLAYIFPLLGSESIFSNTYMTIFFYGCLSFYTFFSESYNFNPLLSLFGYRFYEAQDDTGIGFVLLSKQTITSINGTEFKVRKLTDYIYIYYN

SEQ ID NO: 94281 - protein, 290 aa, Gilliamella apicola
MNLFALMKSNVGIPILRISTDAKSQKALKVIFNDQKALFDTHYDNEIEFCAGYTPKYSEIFVINDFDNGIEDMHAAIKTPTSIDSWNPKKVPIENIKCLFTGNARDRTILLQTFDKKQVLDITKSFIFSNDVFKMSTTVGFNITDKLTAIIEDKKLKFKSLQNTRKIFNMDKYFREATDNELKSFVEHCKFKVSEEFDIIKIADTEIRTKVTLLNKLDSLSEDINKIKQAAENVNFKLKTEVTSGGEEKILIPIVKKELKALLSFLNEDIFISDITKTTYKSNSKRKFTT

SEQ ID NO: 94282 - protein, 172 aa, Streptococcus equi subsp. zooepidemicus CY
MYNRFIHMLFNSSILMPFILAIGLSKTFIEKNFKTGLTITVISFGLAAIQVIILRTAKKNIVPQRINISKISQEKESWVLAIYVSYFVPFIESSFGKNFNFTNWILVVIGIIILILSKRTTNNPVLSVLGYKVYSIETDHGIDMTLISKRDIRNKKAIDKVLRIFEYYVMEA

SEQ ID NO: 94283 - protein, 283 aa, Streptococcus equi subsp. zooepidemicus CY; identical to SEQ ID NO: 93829

SEQ ID NO: 94284 - protein, 357 aa, Vibrio sp. JCM 19052
MKERKASLKIGARLTLFLVSYMPLFVIMVFGQFYKYSNYLNWGGFNWDSLYVFIKYFGAATILIMLSLYGSIGLKVLLTNIERRAKVNGNLVNIYDIENKNSDSISYLFTYIIPFVFQDLSSLINVVSVTILLVVTFLIYSNSSMLLINPTISMRYSLYMIEYTDSDEGKKKKGMIISRNKYLEEDDQVKIKKIGHKLFFAVDIGAMMPAKKKINDILDIIGDQNVTFRLFFITRHIKDGVKKSTKVIDKFQFKANSIDMSPDVSSFFSKNARTQLKKLTEKEGYDLESYNVITDDLGDKLYTYALNNTLSFSDVVFNQLLKNKVGAIASLKDVKSDLWAYCLQINTVNDAAICFVK

SEQ ID NO: 94285 - protein, 122 aa, Vibrio sp. JCM 19052
MEEEFKNVANDVISVIESTNLVEGLEHIKVNLSKSRALLKTLANIGKKGNHSGFNKEEIEKMKNALKLFEGKELKFSSEGKLVLENSIDVGYFVKLLNDYYKVGVITGKYYGTNSGNVIEPA

SEQ ID NO: 94286 - protein, 172 aa, Escherichia coli 3-267-03_S1_C3; identical to SEQ ID NO: 93790

SEQ ID NO: 94287 - protein, 294 aa, Escherichia coli 3-267-03_S1_C3; identical to SEQ ID NO: 93881

SEQ ID NO: 94288 - protein, 68 aa, Escherichia coli 2-011-08_S1_C3
MGVIYIKTDLFYANPSLALLGFNIYKLNVSITGGVNKSGIILITRRQLKENDMVSYIVLDERVYYSGD

SEQ ID NO: 94289 - protein, 327 aa, Escherichia coli 2-011-08_S1_C3
MSPQKLDKKGLDDNLSYYINNKNDVSVIVYAILKNSPIAYRMDIEGSAQNGLKELFLDSLKRNIIDNHELGVLSLSSADERNNVIYHYDIEWPDELTSMQNMLGQQGEPVFDFNVQNIEDIRVLLICIGNAQQQIILYKTMAPVNIFSRTGFFLKKSATRLEEIKDDFFRVSDNFQIIKVENNLYVIDLKLIEKMFCFHDVIKKEAMLGISAIESMDIIADINSIKELIDDVKYARKLTRVAKSSPVILANIENEKIIEFCKIYPVLVNRIRFNEDGTKITLDTKVSKDLFIKVLMDDFLTSQLTQFYYESLAKDALKLAADNTKEN

SEQ ID NO: 94290 - protein, 53 aa, Escherichia coli 3-105-05_S4_C1
MALFGYKLYRVNISHAGSGEVKNVIAISMDVLTVDDQVFYSFFDDYVFIARKK

SEQ ID NO: 94291 - protein, 319 aa, Escherichia coli 3-105-05_S4_C1; identical to SEQ ID NO: 93789

SEQ ID NO: 94292 - protein, 172 aa, Escherichia coli 3-267-03_S1_C1; identical to SEQ ID NO: 93790

SEQ ID NO: 94293 - protein, 294 aa, Escherichia coli 3-267-03_S1_C1; identical to SEQ ID NO: 93881

SEQ ID NO: 94294 - protein, 172 aa, Aeromonas sp. HZM
MLSGFAKLLLTGTAIAPVGLSYAWVAYMADQKTTALLMTAGSLFLVLICIWMLRYAQKNLESIPFIASTIEAADRENMAFMLLYLLPLFTASFSQLNWQIWVPVIVIFAVIASTGYSYHFNPLLGLMGWHFYKVSTPEGVTYVLVTKKELRRAQEGLTVVQLTEYIVLDIGD

SEQ ID NO: 94295 - protein, 294 aa, Aeromonas sp. HZM
MPQNLFALVKTGDVVQIRRIRMSGPLQQQITRLFLQQQDKFLQGIDTEILFNGNWKPDANEILVISGLDEISLMQEAISGNPTSYHDLDLSKVDEETIKALFSGSHNGGQYIIQIQRFMASQALLRKHIPIIGLQSGNTFTEITTPMFTFDHKLVAVIQGNELKFKSYSMLRSVCDLTSVYSEATEPDLERFASHEILHCDNVDEFKSNADSMVRKMVHELTQTNALAEHGVDKITESAADFPDVNIVINDGKIHLPSDKKQLKIFLNFLLDNIYEAPLSGERYLTNSKRRMSR

SEQ ID NO: 94296 - protein, 171 aa, Escherichia coli O91:H21 str. 2009C-3740; identical to SEQ ID NO: 93814

SEQ ID NO: 94297 - protein, 297 aa, Escherichia coli O91:H21 str. 2009C-3740; identical to SEQ ID NO: 93815

SEQ ID NO: 94298 - protein, 171 aa, Escherichia coli O128:H2 str. 2011C-3317; identical to SEQ ID NO: 93814

SEQ ID NO: 94299 - protein, 297 aa, Escherichia coli O128:H2 str. 2011C-3317; identical to SEQ ID NO: 93815

SEQ ID NO: 94300 - protein, 162 aa, Escherichia coli 2-427-07_S3_C1
MNKKALILYIENFGAVTIIFLLVVFGIVGLIFLLSNMERRIDNDGDFVKIVDIENKNSESISYLFTYLLPFLFQDLSDPMSVFSLAILLLVTFLIYSNSSMILINPTLAIKYSLYSIEYINSGGQKKKGMIICSNKYLDEDDSIKIQKIGYKLFYAKYQELE

SEQ ID NO: 94301 - protein, 339 aa, Escherichia coli 2-427-07_S3_C1
MTEIDIKGILNSLMNLYHSNTFSMKCYLITKKINKDSSVSSENRFIFDIYKVSLDKKMVDFFKTGSLDTLNKMVGNNELEYHDYSVISDDGTDAIYGYANIEDLEFRKVLEKINKDSGINILKSLEEVKSDILAFCLKISTQDDGFTIYRKLTKSKVATDTPLNTFQKMQAIFDVNSATMKVVPMQTVSFDKKIDFIFKNNKIYIVSKLGFEQIIGIEKEFVENARSVLKVISDASIIDNIKILEEVILTNKTLQRTIASIAQKKNHENLSPDIIIKYQETLNIFEGAKLEEKNGRLVIKDASDARLLIKVLNDFYKQGVASGKYYGTNSGHIIDKKNN

SEQ ID NO: 94302 - protein, 206 aa, Escherichia coli 2-427-07_S3_C3
MSSRKEELKIGARLTLFLVSYMPLFLIMTVNQLYKKKDYLNWGGVNKKALILYIENFGAVTIIFLLVVFGIVGLIFLLSNMERRIDNDGDFVKIVDIENKNSESISYLFTYLLPFLFQDLSDPMSVFSLAILLLVTFLIYSNSSMILINPTLAIKYSLYSIEYINSGGQKKKGMIICSNKYLDEDDSIKIQKIGYKLFYAKYQELE

SEQ ID NO: 94303 - protein, 339 aa, Escherichia coli 2-427-07_S3_C3; identical to SEQ ID NO: 94301

SEQ ID NO: 94304 - protein, 180 aa, Burkholderia thailandensis USAMRU Malaysia #20; identical to SEQ ID NO: 94224

SEQ ID NO: 94305 - protein, 288 aa, Burkholderia thailandensis USAMRU Malaysia #20; identical to SEQ ID NO: 94225

SEQ ID NO: 94306 - protein, 195 aa, Vibrio parahaemolyticus
MFEKTHNAVLLYILSLSGLFLLFFLQGLNLSVLFDEKKNWIDAVNANGMSLFFLVLLFVCFLIYRSFSNYLKNNTGRATKLQTCSNESFEQLGFFATYIVPLISFDITKSDGLVSCISLLVITGIIFVRTDKFYLNPTLAIFGFKIYKVECGLKCSGENTVIVITKDKLQRGDIINYKTLSERVIYAQRKKTINN

SEQ ID NO: 94307 - protein, 328 aa, Vibrio parahaemolyticus
MPKEKKRLTTNLFKKRFKDFIEDCQGISIYFRLKNDLLRCANIDNGALDKIKDEACSNLMESIVGNPRFHFLRLSNTDDRNPADVMHIFDFANPDEIGTFVKINQAEEASEQAQQVNYAPDRNAAFEDVNAIIIVLEDSQGRKLTLYQKKTNFSVLKEHTNLCNVFYDGATLKQLDQNILQINNKYMCLKFSKLFMVRNVDQFEKDSGFRDIISKKAGDCITFLDQSGLVKDVEPLKQSAKQLPFAKKLTKVLMHSGVISAKVSNEKIIDFVKSKDYLEKVKLTEDEQQFDLKLKYSQNKLLEILDEAYLKSELTGHEFYVRAKDRKK

SEQ ID NO: 94308 - protein, 205 aa, Vibrio parahaemolyticus
MNTLQKIKLYILSLALLFVIIAIITAKLPKESFEWCKPEEACNTKAILSNLFNYFFLLLKANVIPLVMLLLLAISWYFKYEFDHLLQGGGQKIIRIQSIENEDYEHLTFLATYIIPFFGFKFNDPNQFTAIIVLLVIIGAIFVRTNKYYANPTLAVLGYRLYKATLNDKNGVYESIVVISKDQLKENEIVHWEKISDNVFYIKRK

SEQ ID NO: 94309 - protein, 318 aa, Vibrio parahaemolyticus
MSKFKTWLEDFINGCDGIAVYFVDDANQIHDSDIDSKVLAKFRTAFCQDLRKKYTDSDDFEVEKLSTFEERPHTLYGYDFSPREMPLEFKLTKNVLDIKPTDTIPKYQVKANKLSGIRGAIVLLTKGISESIAFYQHIFPVSLLGPDKGVLNLTTHATRLIELESDVLKLNTKFVFMQCTHGYFVENVGVLETNLHFKKAINTRAKKYAGEILSMGLVEDTTVILDRIEKEPTYAKKLISAYKNSMVISQKIPISDMITFAQKKEYYSKYLKPSKNGKSLVVDGVTKSKRFLELLNDNFLKSELTNTEYLARSKKAFK

SEQ ID NO: 94310 - protein, 195 aa, Vibrio parahaemolyticus; identical to SEQ ID NO: 94306

SEQ ID NO: 94311 - protein, 328 aa, Vibrio parahaemolyticus; identical to SEQ ID NO: 94307

SEQ ID NO: 94312 - protein, 110 aa, Vibrio parahaemolyticus
MKVLNSLVFFATYIVPLISFDITKSDGLVSCISLLVITGIIFVRTDKFYLNPTLAIFGFKIYKVECGLKCSGENTVIVITKDKLQRGDIINYKTLSERVIYAQRKKTINN

SEQ ID NO: 94313 - protein, 123 aa, Vibrio parahaemolyticus
MRCANIDNGALDKIKDEACSNLMESIVGNPRFHFLRLSNTDDRNPADVMHIFDFANPDEIGTFVKINQAEEASEQAQQVNYAPDRNAAFEDVNAIIIVLEDSQGRKLTLYQKKTKLLCLKRAY

SEQ ID NO: 94314 - protein, 195 aa, Vibrio parahaemolyticus; identical to SEQ ID NO: 94306

SEQ ID NO: 94315 - protein, 328 aa, Vibrio parahaemolyticus; identical to SEQ ID NO: 94307

SEQ ID NO: 94316 - protein, 195 aa, Vibrio parahaemolyticus; identical to SEQ ID NO: 94306

SEQ ID NO: 94317 - protein, 155 aa, Vibrio parahaemolyticus
MPKEKKRLTTNLFKKRFKDFIEDCQGISIYFRLKNDLLRCANIDNGALDKIKDEACSNLMESIVGNPRFHFLRLSNTDDRNPADVMHIFDFANPDEIGTFVKINQAEEASEQAQQVNYAPDRNAAFEDVNAIIIVLEDSQGRKLTLYQKKQTSLS

SEQ ID NO: 94318 - protein, 195 aa, Vibrio parahaemolyticus; identical to SEQ ID NO: 94306

SEQ ID NO: 94319 - protein, 155 aa, Vibrio parahaemolyticus; identical to SEQ ID NO: 94317

SEQ ID NO: 94320 - protein, 196 aa, Bacteroides fragilis; identical to SEQ ID NO: 93898

SEQ ID NO: 94321 - protein, 283 aa, Bacteroides fragilis; identical to SEQ ID NO: 93899

SEQ ID NO: 94322 - protein, 109 aa, Escherichia coli 2-316-03_S1_C2; identical to SEQ ID NO: 93876

SEQ ID NO: 94323 - protein, 335 aa, Escherichia coli 2-316-03_S1_C2; identical to SEQ ID NO: 93879

SEQ ID NO: 94324 - protein, 90 aa, Escherichia coli 2-316-03_S1_C1; identical to SEQ ID NO: 94144

SEQ ID NO: 94325 - protein, 318 aa, Escherichia coli 2-316-03_S1_C1; identical to SEQ ID NO: 93983

SEQ ID NO: 94326 - protein, 200 aa, Shewanella xiamenensis
MGMDLSNTLDKIGLYILSLLVLFVFIIFLTVDVPYCFGENCEFVGFSAFADIAKKNFSSILSLLGLVAGVYFYFRFENEVKGGSLDVMKIEKSSSESYEHLVFLATYILPFIGFTFDEPRKTIAYFLLLAVIGLIFIKTDKYYANPTLALLGYKLFKTDVSCRGSQYKNMVIISTSELSEGDQVNFKFLSNSVCFARKVE

SEQ ID NO: 94327 - protein, 317 aa, Shewanella xiamenensis
MTVEQFKNKVSAIVDDCVGIKMFFVDDEANIRDSDVDNAALVRLKTSMVSKLKTGIVENESLSIPLLSDADERKNALYKFDFDEKPLEFDLLEQALQLRVNAPDKYQVGDGNFDDISAIIVVLTGRNNETITLYKHQYTVSVLKAEQGALNLFKSNNRLSELESNILKIDPNFVFLKLDNDYYVENVKTLESYLGFHDVIKDTAAKCVAKLTDMALIEDTAPLVERVEGEDMAFSRKLAKVARNSPVMGAVANNDIIAFAQKHKYLSKLLKLNDAGDKFVLKTKISQNHFIKLMSDDYLESELTNIQYDSLAKDKLE

SEQ ID NO: 94328 - protein, 215 aa, Escherichia coli Nissle 1917
MKIRMYLLSMLFLFIPITIYFSGIDNVWSVLDKAMSSCSGADGKFQCVLDYSNSRLTFSVLRSVICGALILTCSYTYIWYRWVLKNLDSGAVSRKLKVVSCKKESGEYLSFLSTYIMPLVFTDLSKPSNIVNFLFVLIIVGFLHIKTKRIHCNPTLSLFNVSAYKITYSVVANGREKTQDGELIVLSKDLIKENDFIRVINHDDYLTFAKKIIEE

SEQ ID NO: 94329 - protein, 380 aa, Escherichia coli Nissle 1917; identical to SEQ ID NO: 93935

SEQ ID NO: 94330 - protein, 216 aa, Klebsiella oxytoca KONIH1
MFITERAIFQPLKEDAVNAESRKNKEQIRRKVDLYILSLAILFVFFIFITCKFPVCFSSQCKFIGWEVLLKNNIVPAICIILLLYSFFAYYRFKYDTKKSVELPVKIVKLEKINYEHLTFLATYIIPLITFDFEKERYILVLAALLVIMGVIYIKTDLFYANPSLALLGFNIYKVDINISGNVIREGVIVITRRKLEAGKMFSYIVLDDRVYYSGN

SEQ ID NO: 94331 - protein, 324 aa, Klebsiella oxytoca KONIH1
MTTQAVTKERLDADLQYYINNKDDVAVIVYAIVKGNNAPLRMDIESPAQNGLKSLFLNVINNDILKNEDLTVLPLSSVDERSKVLYHYDIPIPDELKCLNQALGQPDEPEFDFNVHKIEDIKVLLICIGNAERKMTLYKTMAPVNIFSRDGFFLMKSDTRLKEIKEDFFRVSGNFQIIKISGELFVVDLLLIEKMFGFHDVIKKEAARGMQSVSDMNILTNMDALHELINDVKYARKLTRVAKASPVINAGIDNVSIIQFCKTYPTLKGRIRFNDEETKISLDTKVSKDLFIKVLMDDFLTSQLTKFYYDSIAKDTLVTEVVGD

SEQ ID NO: 94332 - protein, 186 aa, Anditalea andensis
MKPKLLTAILLFISAYSPLFLILAVKDFDFYINYKFNHPLGISILLGLSVLSVILLFVTINTIKRGNMPVTVKAVKNRSVDLINYTIPYIVSFFGFNLAKVEDIISLSIFLFLLLLLTIKSKSVFMNPILLLAGYNLYDLEYEFDGKPSSTIVISKYEMKTGERFYIRSLTRFLYFVTEKETTDAQ

SEQ ID NO: 94333 - protein, 318 aa, Anditalea andensis
MPNRQRQTLRQLKALDLRGTNVTLAVVKEYKRDRISQYKVKYVPIDQRLENRLRTIIVNPIKNSNTVEEYAYDCPEPEEDLVRAIDYEATDFYQIFKQLEELNPEEDIIENVEELVKSKAYMIILRNAEGIQVVGFKTLPENWRMKRNKGLIPLLFTENRFEDLEQENVFSISSKVDLYYFNEYLFILSKKDFERGLNFRDGMINNAIEMFQEVTELNIFINMEILTERVGNNQRYLRKIATIRNLGHYRNSTYLQRLHQLSITKRWNIQFEEEQIVITDETLDDILTLLQNKRLHSELTEEDFDVDSTKPVNSNTQQ

SEQ ID NO: 94334 - protein, 196 aa, Bacteroides fragilis; identical to SEQ ID NO: 93898

SEQ ID NO: 94335 - protein, 283 aa, Bacteroides fragilis; identical to SEQ ID NO: 93899

SEQ ID NO: 94336 - protein, 178 aa, Gilliamella apicola SCGC AB-598-B02
MIKYFWRLLLTASSIAPVCFTVSFIGFVNKNHYLLYSSLAVGVGICLTCIVTINLANKQLQILKKMIISATPANKEITNYFLSYVFPLLGSETIFQNTGMTIFFFVCLIVYTLFSQSYNFNPLLSLFGYKFYEAQDATGVGFVLLSKITLQSIDPKKTVNVKQLCDYIYIYYNGDKNE

SEQ ID NO: 94337 - protein, 289 aa, Gilliamella apicola SCGC AB-598-B02
MNNNYSLFAIMNNSVATGVLIINMSADTQEKVSNILNQQLSAFNSHYDREIEFCAGYTPSQSEIFTIDGFTDCNELYKYISGEIKATEFNPKKHSADNIKCLFAGNEETIILQNFDKKQVLNVERTLFLSSNVFELSTSIGFNLPDKLAGVVTGNKIRFKSFQNLRKIFNMDKYFREATEEELKQFVLHDKFYKEPGFDIIKVSDTEILTKVALINKISSMDFPISKMKKYAKQVTFDLKIIKDDKGEEKIVIPTDKKGIKLLLSFLNEDIFKSGITKKTYKSNSKRPI

SEQ ID NO: 94338 - protein, 203 aa, Listeria monocytogenes
MATTQQKIMLYLSSYLPLYILLFLNIFFNSENESEMHKNINFCALVRFENIQVSVYASVLFILSCLSIYNVLRLIVLKKGNEEISIVSQFSSMGDNIISYIMTYIVPMLSINPFNLWSLISNTFLFIIIGIIYISNNLIFLNPVIAVLGFKIFEDDKGAVVITKMSIGDLDAFKKSNTEVMKYEIDSNIYMLKEIKKEKPCKR

SEQ ID NO: 94339 - protein, 313 aa, Listeria monocytogenes
MEINIEEMYNEIEKLRKKCNGKVALFLIRYKAGAPLFYKPHIQQEVQEELLDIFLDEFKNTAKRNVNQEEYDFVINNNDINYITNKDKFVETNNFFSKLEDENNHIKELKKLAINQVFAYSVRVKLETDNYLYFFGSFKNLAKIKKGKVIGNLKKNELVSLESNSVLGLDGNIKLLFWENDILIRQTRFFEKLCDLSKLYKNESQKVLKVISEYAVIENMTRLTELANENILIARRLTKLNSDPERVKNFFKNVENVEKVLQDEKFNDKFTGITYVDKKLNYDENEPNKFITLIADAAYESIVGKEKRIDKGL

SEQ ID NO: 94340 - protein, 194 aa, Listeria monocytogenes
MLTKSKKWCLFISSYLPLYVLLLISFLFNNKIPHEFREYFSTLPAGIVVLFLLILFSITVILKLIILKKGNERIPITENYSSTGDNVISYVMTYIIPMLSLLDNPNAENITINILLFIFIGVVYVSNDLVYLNPILAFLGYHIFESDKGTLNITRLTLGQLDALKKEGTKVMRYKVATQVFLIKRIKKRNEKKK

SEQ ID NO: 94341 - protein, 311 aa, Listeria monocytogenes
MMDLQSIYSSLSEMSPEEINGRISFYLIRYKNGNPLIYKPEIQQEVQVELVNLFLDDFKKEKRREIQQEDYDFVVSNNDLYYTIKKDKYKEISNLCDKFADDEHIESLDNLHLNQIFAYGVGVSLEELEFMYFGSFTMISKIKKGRILANLNNSELKVIKRNETLGLDGSVKVIWSEDEILALNTQFFERLFDLTKLYRDECKSVLSTISGYAVIDNMEDLVEHAISDTRIAKRLTKLNNDPERVKAFFKNVKNVEEVLKSPNLKERFDGIKYIDEKLVYDESCKHKFITLIADAAYKSIVGQQERVDKSL

SEQ ID NO: 94342 - protein, 194 aa, Listeria monocytogenes; identical to SEQ ID NO: 94340

SEQ ID NO: 94343 - protein, 311 aa, Listeria monocytogenes; identical to SEQ ID NO: 94341

SEQ ID NO: 94344 - protein, 194 aa, Listeria monocytogenes; identical to SEQ ID NO: 94340

SEQ ID NO: 94345 - protein, 311 aa, Listeria monocytogenes; identical to SEQ ID NO: 94341

SEQ ID NO: 94346 - protein, 194 aa, Listeria monocytogenes; identical to SEQ ID NO: 94340

SEQ ID NO: 94347 - protein, 311 aa, Listeria monocytogenes; identical to SEQ ID NO: 94341

SEQ ID NO: 94348 - protein, 194 aa, Listeria monocytogenes; identical to SEQ ID NO: 94340

SEQ ID NO: 94349 - protein, 311 aa, Listeria monocytogenes; identical to SEQ ID NO: 94341

SEQ ID NO: 94350 - protein, 194 aa, Listeria monocytogenes; identical to SEQ ID NO: 94340

SEQ ID NO: 94351 - protein, 311 aa, Listeria monocytogenes; identical to SEQ ID NO: 94341

SEQ ID NO: 94352 - protein, 194 aa, Listeria monocytogenes; identical to SEQ ID NO: 94340

SEQ ID NO: 94353 - protein, 311 aa, Listeria monocytogenes; identical to SEQ ID NO: 94341

SEQ ID NO: 94354 - protein, 194 aa, Listeria monocytogenes; identical to SEQ ID NO: 94340

SEQ ID NO: 94355 - protein, 311 aa, Listeria monocytogenes; identical to SEQ ID NO: 94341

SEQ ID NO: 94356 - protein, 194 aa, Listeria monocytogenes; identical to SEQ ID NO: 94340

SEQ ID NO: 94357 - protein, 311 aa, Listeria monocytogenes; identical to SEQ ID NO: 94341

SEQ ID NO: 94358 - protein, 194 aa, Listeria monocytogenes; identical to SEQ ID NO: 94340

SEQ ID NO: 94359 - protein, 311 aa, Listeria monocytogenes; identical to SEQ ID NO: 94341

SEQ ID NO: 94360 - protein, 194 aa, Listeria monocytogenes; identical to SEQ ID NO: 94340

SEQ ID NO: 94361 - protein, 311 aa, Listeria monocytogenes; identical to SEQ ID NO: 94341

SEQ ID NO: 94362 - protein, 194 aa, Listeria monocytogenes; identical to SEQ ID NO: 94340

SEQ ID NO: 94363 - protein, 311 aa, Listeria monocytogenes; identical to SEQ ID NO: 94341

SEQ ID NO: 94364 - protein, 194 aa, Listeria monocytogenes; identical to SEQ ID NO: 94340

SEQ ID NO: 94365 - protein, 311 aa, Listeria monocytogenes; identical to SEQ ID NO: 94341

SEQ ID NO: 94366 - protein, 194 aa, Listeria monocytogenes; identical to SEQ ID NO: 94340

SEQ ID NO: 94367 - protein, 311 aa, Listeria monocytogenes; identical to SEQ ID NO: 94341

SEQ ID NO: 94368 - protein, 194 aa, Listeria monocytogenes; identical to SEQ ID NO: 94340

SEQ ID NO: 94369 - protein, 311 aa, Listeria monocytogenes; identical to SEQ ID NO: 94341

SEQ ID NO: 94370 - protein, 194 aa, Listeria monocytogenes; identical to SEQ ID NO: 94340

SEQ ID NO: 94371 - protein, 311 aa, Listeria monocytogenes; identical to SEQ ID NO: 94341

SEQ ID NO: 94372 - protein, 194 aa, Listeria monocytogenes; identical to SEQ ID NO: 94340

SEQ ID NO: 94373 - protein, 311 aa, Listeria monocytogenes; identical to SEQ ID NO: 94341

SEQ ID NO: 94374 - protein, 194 aa, Listeria monocytogenes; identical to SEQ ID NO: 94340

SEQ ID NO: 94375 - protein, 311 aa, Listeria monocytogenes; identical to SEQ ID NO: 94341

SEQ ID NO: 94376 - protein, 194 aa, Listeria monocytogenes; identical to SEQ ID NO: 94340

SEQ ID NO: 94377 - protein, 311 aa, Listeria monocytogenes; identical to SEQ ID NO: 94341

SEQ ID NO: 94378 - protein, 197 aa, Pantoea sp. 3.5.1
MDSRPYLKTVLYILSLWLLFLSLLIMSYDKVLIKNLWDYIFTENFTFSISSLKVRNIVFIVSLIFIFIGAIILIVLANSFGSGWSVACTVSDISNENHEHLEFLTTYIMPLVFTDVDSKRTVLNLGLMIFVIGAIYVKTNRFYSNPSLAILGFRIYKANVHDRGVKKCTVICRSVLKSTDNIKYIKIDDETYLAKIV

SEQ ID NO: 94379 - protein, 323 aa, Pantoea sp. 3.5.1
MFTNIENILKSKCISGEAFFVADVQGTIDIFKVNLEPNAEKDLTTSFSKSLINNIIEPNRGKAAVPLVSTLLERDKQVFEYDHLAINHLPIEFTKMNNVLNFGVNGNATQFDFATQSLTSVKAVIYHLCDGNGNSVVIYQHKYPVSLHKKTKKSFLSLNGRTLDKITHDSIDINDTIDFFFFQNKYYALNIKLLERMYGLESVIDNLANNSTPLIINLGIVNTQGMPVPLDIFKDMYKDRAFMRRLAMVSKGNLVKTGVSVPQIQQVMQKFPVFQRNIDLTGGLINLNTKDQKRYFIRLLNNEASFAALDNSPFLAVEKDSAA

SEQ ID NO: 94380 - protein, 177 aa, Gilliamella apicola
MITYFLRLLLTASSIAPVCFTVSFIGFINNNYYLLYIPLFIGVFICVLCVVTIGLINKHVQILKKKITSVTPANKEITNYFLAYVFPLLGSESIFQNASMTIFFFVCLIGYTLFSESYNFNPLLSLFGYKFYEAQDSTGVGFVLLSRNTLVSINPKKSINMKQLSDYIYIYYDGDGN

SEQ ID NO: 94381 - protein, 285 aa, Gilliamella apicola
MYSLFAIMNDNVATGVLIINMSANTQKKVTNILNQQLSVFNSHYNREIEYCAGYTPSPSEIFIIDNFTDCRELFQYTSGEKTATEFNPKKHSADNIKCLFTGNSKTIILQNFDKKQVLNVNKTLFLSNSVFELSTSIGFNLPDKLAGVVTEDKIKFKSLQNLRKIFNMDKYFREATEEELKTFVANDKFYTDPGFDIIKISDTEILTKVALISKIKTMTHSISNIKKYAKQVGFTLKTTIDNGEEKIVMPTDKKEIKLLLSFLNEDIFKSGMSKQTYKSNSKRPI

SEQ ID NO: 94382 - protein, 172 aa, Xenorhabdus bovienii str. feltiae France
MFLNKFARFALTATSVAPVCITLAYLAFIQKNHIMLGVYIFIGVISVCFCIFILNYSIHHSGQTKKNIKTATPANKEVTNYFLTYLFPLLSTSGTFLDWKIAAFFYISLLAYVSFSEGYSFNPLLSFFGYKFYEAEDETGVSFVLITKRDLFSVNNDRLDVIKLTAHTYLVV

SEQ ID NO: 94383 - protein, 294 aa, Xenorhabdus bovienii str. feltiae France
MELFAITDTGKIVKIITDSKTQRSVSALFKKQKEYFENNYTTSVEFSGGYITSPAEYFCIDNFDDVIGVLDAIQTPTPIQEWSPQDISIFNIKALFSGEVTSSETGGNIKAYLQCFDKRQIIDNKKTLFHSVIQDKNTFKLSDSDGLVIDNKLTAILENNKLKFKSFHMLRRIFDVDGYFKEATDDDLRAFSNHEHFYISDNFDLTSVADTVIRKKVSLINKSRILELHSVEALLSAANEVGLDLDIREDDGKNKIAMPQEKKHIKRLLCFLDEDYFTSQITQTLYMTNSKKKV

SEQ ID NO: 94384 - protein, 172 aa, Xenorhabdus bovienii str. feltiae Florida; identical to SEQ ID NO: 94382

SEQ ID NO: 94385 - protein, 294 aa, Xenorhabdus bovienii str. feltiae Florida; identical to SEQ ID NO: 94383

SEQ ID NO: 94386 - protein, 187 aa, Vibrio cholerae
MTGNNEGLSLARLLMVLSSMSPLFILWAIKGWGIKGISEVYFLSFCLFFITVPNLFLWFRVRLVKKRKDRRELTAGDCEDHRDHLLVYLFAMLLPFYSVNIDSIRDLAGHVAAITFIVFLFWHLNMHYMNIFWAMKGFRVYTLKPDTENNSISGRIPVVLITKRSHIVKGEKISAYRLSQTVFLEDE

SEQ ID NO: 94387 - protein, 303 aa, Vibrio cholerae
MPINFDFENVNITEFGLGLDSPNRGFVFVPVDEVVQKSLVEMVSFTKTQMQDKASSMATYQPSEKYASIEYLTFSINDPLVQELKTLHESENVPEDCSAFDNINQCFAYFVKLTDNNQQRITAVRRSTQFKTLIKKRHRLVQYVDNTLKSLEETVFKLDNDFDFIIQNDLIHILRPSGLEFTAQLQKAIMDAVPANIASIASEIDFVNFDSISQYAQNHPRAARYIASIKSQSEAINISQDKLERYCEKTNVVTNIVDGKINLDSSQIMGFLEVLDRRRYEIDLKDDGESEVYRAPSRSRVTS

SEQ ID NO: 94388 - protein, 171 aa, Escherichia coli; identical to SEQ ID NO: 93814

SEQ ID NO: 94389 - protein, 297 aa, Escherichia coli; identical to SEQ ID NO: 93815

SEQ ID NO: 94390 - protein, 181 aa, Flavobacterium psychrophilum FPG3
MKKIQLYIISLWLLFFLVAVKEFVFISWTFSSSYENIMNFLSLNSISLISFCLSLLGLFYYARFTYFLKGSTRLPKKIIKIEDQSYEHLTFLTTYIIPFLRVKLEGKDLVVTILLLIIIGAIFIKTNLFYKNPTLALLGYKLFKVDTEKNTGLIFISKQNLKLGDEVHHIPLSDNVYFVKL

SEQ ID NO: 94391 - protein, 319 aa, Flavobacterium psychrophilum FPG3
MTREELITRLNYFLNPNNNVGAVLYFVLDHEGETVIRFADIENVAKLELKNRFLEYIQEKFINNEELHYQNISEADDRKNVVYKYDIDERPESLNILDEILANEEQIHFNFNQDQLVNIKGYLITIGNEGNKIALYKKHHSMNILRRDRFLLVPSGERLVEVQNDVIALDKSFDFMMVDDNLIVLKLNILERYFGFEDVIRNQALNTIGLVEANELLEDIEQLMEIAQSMPNARKLMKIRNSPVLNVPVINVINFIRNHPELTGKISFNADGTKINLETGVSKKLFLKLLNDDFLFSQLTELQYDSHAKDKLLEIQNEN

SEQ ID NO: 94392 - protein, 126 aa, Yersinia enterocolitica
MFYLFSSLSRGWGSTRKVINVKNQTHEHLEFLTTYVMPLVFTDVNSKRTVINLLLMICFIGVIYVRTNRFYANPSLAILGFRLYKCSIKSDPSCKEYTIICRGKLSNGSQVKIKKIDDDTLIAKLI

SEQ ID NO: 94393 - protein, 335 aa, Yersinia enterocolitica; identical to SEQ ID NO: 93801

SEQ ID NO: 94394 - protein, 211 aa, Yersinia enterocolitica; identical to SEQ ID NO: 93800

SEQ ID NO: 94395 - protein, 335 aa, Yersinia enterocolitica; identical to SEQ ID NO: 93801

SEQ ID NO: 94396 - protein, 184 aa, Burkholderia xenovorans LB400
MYLLSLWLLFVLVIVNKAVIDVNICLGCSLLPWSELSKIVKENLLPLVCVAMLAASAVFYMVFVRIISGAKDGPIKVEELEDKNAEHLVFLATYIIPLVGFSLDSPRQMINLGITLLLLGAIYIKTDLFYANPTLSLLGFKIFNIRSQGSAAILISKEELEAGDSVNVVRLDKKIFFARKATRV

SEQ ID NO: 94397 - protein, 305 aa, Burkholderia xenovorans LB400; identical to SEQ ID NO: 93697

SEQ ID NO: 94398 - protein, 171 aa, Pantoea vagans
MLNSSAKYLLTASSVAPVCLTLSFVAAVNEHYAFAAFSVGIAVLSFFLCWLIIFLIKKHINITHVNLRSVKPANKEITNYFLAYLFPLITDDKLISDWYLACFFYISLFVYVGFSGSYSFNPLLCLLGYKFYEAEDDTSVSFVLISKDTIRQGHVDDLKVVQVTDYTFLII

SEQ ID NO: 94399 - protein, 289 aa, Pantoea vagans
MQLFALTDEDLTPNIYNIDVDKKTSGVIKSAFTQMEADFNNAYNEVIPFSADYKLDKREHFILEGFKEHETLVKALKIPKAVPNLHIDRVPLKKIRALFTGSTDGKKIIIQRFDSRQVLTPSNILFLDSKATFTHTTFGGISIGPKITAVINADTITFGNFNSLRRVFDMDAYFREATDPELDSFQDNGVFAIEEGFKLSSFDDTTIRRKVTLLNQTGILDTGNIPALIAAAKELKHPLEIKDTAEGKRINMPVEKRKIKLLLNFLDSDIYISAVNGRKYRSNSKRQID

SEQ ID NO: 94400 - protein, 191 aa, Prevotella histicola JCM 15637 = DNF00424
MVRKIVFYFLSLWLLFVLIFIITADIPICLCKDSSFVEIRYFFLHTIIPLCSIVALLLGGYAYLKFLHITKGTKELSFEIKEIESIEYEHLTFLTTYIIPLVCFNFGSLRYIVVFVILLFVIGCIYIHTDMFYANPSLALLNFRIYKVKGLFRSGEVRENRILITRDKLDIGDNVKYLKLDERIYYALKIK

SEQ ID NO: 94401 - protein, 317 aa, Prevotella histicola JCM 15637 = DNF00424
MNKQELNEALAFISAPEGELQIIIYANISGANEPRRLDIKEEDLTELRKLFVASIESSIISKEDHTVLLLSSADERGNCFYQYDLEVPEGLGHLETIIGNDSLQNFDFNKNKFESIESLIIVLADSKHEISLFKKLSTVEVIGRGGFILGKSKHRIERFKDQLLRITSSFQALRVGGEIIIINLDAIEKEFGFHEVIIKEATKSLSVIEEKELVDNIESLKDLVSDVRFARKLTKVARNSPVIRLGIPNENIITFAKKHPLTKKKMKYNDNQTKFHLDTKVSKNLLIKILNDDLLTSELTKLYYDSLAKDDIIVEEE

SEQ ID NO: 94402 - protein, 93 aa, Veillonella montpellierensis DNF00314
MMTYIIPLITNGDNSKEVYIVNILLFVLIGYIYLRLNLIYLNPLWAMFGYIIYRDANKEIVITNIPREMLRHKEKLKGYYISNDIFVAHKKDN

SEQ ID NO: 94403 - protein, 309 aa, Veillonella montpellierensis DNF00314
MKFKGKVMDINTLKDKIQENDLEFNLFFTRKLRNGNYVSFSPNIDAQIYDDLLSLICDYIGQFTDKTIANYNPTGYKDETIESCSASYIRDYIRVLESFNNSDHVETEIDPDNYSFYTFSITKHDDQFPDIKIFRRVTKFKKLHSKGIIARFNGNTLNKIESKLIGIDGEVDFIIIDNDILILSHYSLERVFNLDEQFRDTASDFLNQEGLSDGITNFESFYEDCLNDGRYRKTLTKMTSENINVAKTYENHENIKKTIDMFNLEINYNEEPSFSIVYEDKSQIMDILRILRDSYYRSIINEQIGVDDK

SEQ ID NO: 94404 - protein, 204 aa, Clostridium orbiscindens 1_3_50AFAA
MGNTRQKHEQDTAIKLRFYFMSLWLLFVLIFLLTVDIPICFSKDAHFIGFGPLLKRNWLAFISLFFAILGWLVASREKQRWAGVTNPPYEIESIKNENYEYLTFLTTYIIPLICIDLTKIRYVFVLAVLLVLIGFIFIRMDLYCGNPTLALMGYRLYRAEIKGVDAPDGIVLISKDRLSKRSAIKWISIDKYVWIAKEIKNDVG

SEQ ID NO: 94405 - protein, 180 aa, Clostridium orbiscindens 1_3_50AFAA
MIKRESFLLGAIRSSERFEKLPGEDIIRLNNDAQLLRVGDTIFVLNLKMLERNMGFSALIQQAATETVSAIEELDILDDIEVLRDTLEVPSFARKLSKVKKASPIFKLGISKEAIVEFTKNTPELAGKFKYSEDGTQIRLDTKKSKIAFLKLMNDAFLHSELTQQWYDASAKDNITQGAG

SEQ ID NO: 94406 - protein, 196 aa, Lactobacillus sp. wkB8
MKKLQKVMGICLKIFLFLSSYIPLFIMVFLNSMNQISIISIVKTWNLNPTLWIIFLVISFLSIVIFISWLYRMKKTFKGKSPISIKNLTLNDSAVLNFFVTFIVPIISLKPESWPSVISNLILLIIEGIFFISNNTLYFNILLIFCGYHIYSFVSDNNRKNIVITKCSLKDQTFNDVKGVEYGTTNIYYAEKIKHK

SEQ ID NO: 94407 - protein, 313 aa, Lactobacillus sp. wkB8
MNLDEIKKLLNNDLIEVDMYMCHWSTDKKNNQKELKVINPTIKDKLKKQLKHIVEFNIDEFKDYDNTEYNIIGCDDDKIESTSVTRYQNQINLIFKALKGPFESDDDIKIDDFDFFVYKFSFKDNDDKRDFYAVRRTKKFKALKTGIWGMLEGGVYSSLDTENVLGTDSWVDFFIYKDDILILQHISFERILKLKNEFKEAAERVLSSELLHQKIKNFDQLKIDALNNQNYIKRLSKLEGTSRINLFLTKLDRTKDAIDKLGLDIEVDTMADKLVYNNNSQLGEFINLMQDAYYKTLIGEENGVDERKNLISK

SEQ ID NO: 94408 - protein, 194 aa, Porphyromonas cangingivalis
MIKKAGFFFLSLWLLFVMIIIITIRIPICFSKDYSFVGISYLLSTNIIPLCSSLALFIGGCSYFNLENQLKGTKELSFKITEIENIDYEHLTFLTTYIIPLVCFQFENLRYVIVFVILLIVIGLIYIRTDIFYTNPTLALLKFRIYKVTGTFRKREVRENIIIITKEELNIGDDVKYIKLDKRIYYASKVKTDE

SEQ ID NO: 94409 - protein, 318 aa, Porphyromonas cangingivalis
MNKQELDNALAFIDAPQGELQIILYANIEGIAEPRKLDIKEEDLSGLRQLFASSIKASIIEKEDYTVLPLSTADERGNCFYQYDLDIPDELQLLETTIGNDNLQNFSFIDNQFSNIESLIIVLADTENEISLFKKLSTVEVIGRGGFMLWKSNQRLEKFNDQLLRISSKFQALRVGGEIIITDLASIEKGFGFHDIIIREATNSIRVIEELRLVSNIDSLENLVSDVRFARKLTKVARNSPVIQRNIPNADIIAFSKRHPLTKNKMRYNANQTQFLLDTRVSKDLLIKILNDDLLTSELTKLYYDSLAKDGIEVEEEQ

SEQ ID NO: 94410 - protein, 190 aa, Flavobacterium psychrophilum
MFSKPLKTIFAITAFAPILLIWWIVSILSVIDKKGETKIIKLSEITLENFQNKWYLGIGFIISVLICYFLIFLIRKKLTRNFIEIKSIKSADLHMNTILFSYLLPCTELYKKDSIYIYAWIILLFIIIYINRNTYFYNPLMKFFGYRYYEIATKKEITYTMISKEKLINADDCNAYSQITDYVIFNSTIK

SEQ ID NO: 94411 - protein, 280 aa, Flavobacterium psychrophilum
MPNTTCNFFAILKNDSIKKIDLLQTITESIRNVFVNASLHLINDDTEEILFDGNYAVQEEEVLFVNLELPINLTNATSNPIGLGVLDINIDQIKTLFWFENGVYYFQNFDNRKLLQNRNIIFWDETSFNKFTENALIVENYINGLYKDNKFYFNNFVNANKIFNLSSFYQEATDKEITEFVKNDNISINLDWLLKNSNSLLRKQITLLEKSGILKNTNTKKVKISANHFKLKIELTTDGKLILPENKKDCKNVLAFLNEQYYFGVITKNKFMSNSKKIIE

SEQ ID NO: 94412 - protein, 175 aa, Knoellia aerolata DSM 18566
MTRVVGFGLLASAFAPMVALLAVVRFDALGRASWVILAVCGGAVVLLAAVLRSVAGIQARTIDCQSVRRADERVLAFTSSYVVPLVVALFGESDTPTLVATSALVALMATIYVRAGLYHLNPTLALAGYRLYEVTATNGTVTMVLTKEWQHLRQQGPLVCRYVGDDVAIHRKERP

SEQ ID NO: 94413 - protein, 315 aa, Knoellia aerolata DSM 18566
MTAEPARQVLVTAVAAGGGALDNFVVRGDAIAGAEVTRFDLVDDMAAAVSHDVLTSIDALARKQFLTYDPSYQTSTSQVLVEELDQIPELAAVDAEVRRGDVPYTADGPPVVAMAHAVGRGDNRVVAYRLKGPGIATRRSKGFTLIPRDGIYRPVDGDVLFYEPRFDAFTCAGVVYFSMVTLIQTRLHADHKARLLAKDTLAAVTSNLTIDGFSDLEKAVMDDPSMRAKMASVARLIHTDPGYAKNLTTKKLVKFVETYPDYDIPVTTLNGKKVLAFDPSPQHRHQIPRLLADDYLHSYLTDRNYEAGSKQRLQK

SEQ ID NO: 94414 - protein, 194 aa, Porphyromonas gulae
MIKKVGFFFLSLWLLFVMIIIITIRIPICFSKDYSFVGISYLLSTNIIPLCSSLALFIGGCSYFNLENQLKGTKELSFKITEIENIDYEHLTFLTTYIIPLVCFQFENLRYVIVFVILLIVIGLIYIRTDIFYTNPTLALLKFRIYKVTGTFRKREVRENIIIITKEELNIGYDVKYIKLDKRIYYASKVKTDE

SEQ ID NO: 94415 - protein, 318 aa, Porphyromonas gulae
MNKQELDNALAFIDAPQGELQIILYANIEGIEEPRKLDIKEEDLSGLRQLFASSIKASIIEKEDYTVLPLSTADERGNCFYQYDLDIPDELQLLETTIGNDNLQNFSFIDNQFSNIESLIIVLADTENEISLFKKLSTVEVIGRGGFMLWKSNQRLEKFNDQLLRISSKFQALRVGGEIIITDLASIEKGFGFHDIIIREATNSLRVIEELRLVSNIDSLEQLVSDVRFARKLTKVARNSPVIQRNIPNADIIAFSKRHPLTKNKMRYNANQTQFLLDTRVSKDLLIKILNDDLLTSELTKLYYDSLAKDGIEVEEEQ

SEQ ID NO: 94416 - protein, 192 aa, Chelonobacter oris
MTNTRQKIDLYILSLGLLFIFFFIISVEPPTSFFFEEFESWENLVMNNPLPVISIFGLLYCLFAYLRFDFDLKGANEIPFEVKKLENINYEHLTFLATYVVPLISFDFDSGRQLIVLALLLVVMGIIYIKTDLFYANPSLALLGFHIYRASGHFKNGEREGITLICRERLVENQRVSYIKLDEKIYYVRSVK

SEQ ID NO: 94417 - protein, 323 aa, Chelonobacter oris
MTTDELKEALRAYYDDQGNIGVCVYALMKDAKNPGPFKLDIEADAEAGLKALFMQSLQDEILSRDELSVLNLSSADERVNAIYIYDLDIPEELASFEKEIAQDNLPALDLNKRSLSSIKALLIEIGNNTGQLVLYKTMAPVNIFGRSSFFLRKHKSRLEKLNDEFLRVSAGFQMMRINETVLVLNLEALERNFGFHDVIKKEAELGIDAIVSAELLTNPDVLQELIDDVKYARRFTKVAKASPVLKAGVSGESIVQFCKTFPNLVGRIKFNEENNKVFLDTKVSKDLFIKVLMDDFLTSELTEFHYASVAKDAVEPGVEGTGQ

SEQ ID NO: 94418 - protein, 194 aa, Xanthomonas vasicola
MQFQFWSALFIFLGSYFPLALILMVQDISAKYWGAPLCGWRGQWNCQFQVFGHPWLASGSVGVTLGALLLMVVVLRSVRLTHRVHVQEVKAIPNDLINYVLPYVVSFMGLSYGDPQKLGGFLVFWIGLFVITYRSGQILMNPLLIVLGWKLYEAKVTLGQVGAVRMVRVLKKGALLPSIQIAEEVQDVYLMGDP

SEQ ID NO: 94419 - protein, 309 aa, Xanthomonas vasicola
MTEQALRELQSFNLDDARVHLWVFKSSTTVNRFTANYVRIDEALEGRLREFAKTQRAKMTEWIPYGHLAQPTDNGCLSVSAADTDFAMLQALVDRPELEHPIIKRDQLKNAAGYVVKFYQEERVLYAVRRSPATWKTAYRKKGVVNMTFRNGALSAVQEVDFTLEPGFDLFALNESLLVGNKRAFESMMKYRAGFVNAFVELQEEEKFVSLFTDMAPLVDHVGLNGTHLRRMAVIQERRLYENPKYLGTLRQVCERHNWGIQFDAEGLIIPTEETAKVIMTLLLDQRLISEITAIMYDVPGGHRVDAVQ

SEQ ID NO: 94420 - protein, 227 aa, Burkholderia pseudomallei MSHR7498
MTVLFNRGKTQYIPKSAISGSGHETFKVPSRAMEMRLFPALILFLGSYFPLSLILLIQDVKEASWKAPLCRITEISSCYFPVLANPYRALGLLGICAVSLIVFMVLMRNLSGYSSLEVVDSKSIPNDLINYVFPYVVSFMGLDLGIDGKFFGFLLFIVLMFVITFRSGQILMNPFLLVAGWQLYELNIVTEGHKRCVKALSKEQVKSGDKLESCLVHGIYVLHRGEK

SEQ ID NO: 94421 - protein, 310 aa, Burkholderia pseudomallei MSHR7498
MTIQQDLQDFGAFDIAHATASLWVFKKRPATGQMNPFTTVSVVMSDALRDQLKELAKSYQASHTIAEEYNLLSQPSEGGFLAVSREETLFPSLQGLIDQPLEECLVKNVKQLNNAAGYVLRLRHDEAVIYCVKKANADWATRKKKGMMNIFFTESGLDIMDSPSFSISRSFDFFVVGENVLMASKPAFESLLNHKDTYEEAYAELKQEPGFSAAIADFTVFDTFIGKNATHLRRMAVIKARGYYQKADYMARLREINGLRGWGIQFDEQGRIIATPEKMRDILHVLLDHRLRSELSDNQYDVPSTTPVGP

SEQ ID NO: 94422 - protein, 109 aa, Escherichia coli; identical to SEQ ID NO: 93876

SEQ ID NO: 94423 - protein, 335 aa, Escherichia coli; identical to SEQ ID NO: 93879

SEQ ID NO: 94424 - protein, 195 aa, Burkholderia pseudomallei MSHR4304
MEMRLFPALILFLGSYFPLSLILLIQDVKEASWKAPLCRITEISSCYFPVLANPYRALGLLGICAVSLIVFMVLMRNLSDYSSLEVVDSKSIPNDLINYVFPYVVSFMGLDLGIDGKFFGFLLFIVLMFVITFRSGQILMNPFLLVAGWQLYELNIVTEGHKRCVKALSKEQVKSGDKLESCLVHGIYVLHRGEK

SEQ ID NO: 94425 - protein, 175 aa, Burkholderia pseudomallei MSHR4304
MTIQQDLQDFGAFDIAHATASLWVFKKRPATGQMNPFTTVSVVMSDALRDQLKELAKSYQASHTIAEEYNLLSQPSEGGFLAVSREETLFPSLQGLIDQPLEECLVKNVKQLNNAAGYVLRLRHDEAVIYCVKKANADWATRKKKGMRTSSSLNLGSISWTALHSAFLEVLIFLL

SEQ ID NO: 94426 - protein, 195 aa, Burkholderia pseudomallei MSHR4308; identical to SEQ ID NO: 94424

SEQ ID NO: 94427 - protein, 175 aa, Burkholderia pseudomallei MSHR4308; identical to SEQ ID NO: 94425

SEQ ID NO: 94428 - protein, 195 aa, Burkholderia pseudomallei
MEMRLFPALILFLGSYFPLSLILLIQDVKEASWKAPLCRITEISSCYFPVLANPYRALGLLGICAVSLIVFMVLMRNLSGYSSLEVVDSKSIPNDLINYVFPYVVSFMGLDLGIDGKFFGFLLFIVLMFVITFRSGQILMNPFLLVAGWQLYELNIVTEGHKRCVKALSKEQVKSGDKLESCLVHGIYVLHRGEK

SEQ ID NO: 94429 - protein, 310 aa, Burkholderia pseudomallei; identical to SEQ ID NO: 94421

SEQ ID NO: 94430 - protein, 195 aa, Burkholderia pseudomallei; identical to SEQ ID NO: 94428

SEQ ID NO: 94431 - protein, 310 aa, Burkholderia pseudomallei; identical to SEQ ID NO: 94421

SEQ ID NO: 94432 - protein, 172 aa, Enterobacter cloacae; identical to SEQ ID NO: 93926

SEQ ID NO: 94433 - protein, 297 aa, Enterobacter cloacae; identical to SEQ ID NO: 93927

SEQ ID NO: 94434 - protein, 200 aa, Enterobacter cloacae; identical to SEQ ID NO: 94218

SEQ ID NO: 94435 - protein, 313 aa, Enterobacter cloacae
MDKKDLDDNLSYYINNKDDVSVIIYAILKSSPDAYRMDIEASAQDSLKELFLDSIKNNIIDDGDLSVLPLSSADERNNVIYQYDIGWPDELTSMQNMLGQPGEAVFDFKTQQIEDIRVLLVCIGNADQQIVLHKTMAPVNIFSRTGFFLKKSATRLEEIKDDFFRVSDNFQIIKVENDLYVVDLKLIEKMFGFHEVIKKEATLGMTAIEGMNIITDIEVIKELIDDIKYARKLTRIAKSSPVILAKIENEKIIEFCKTYPVLINRIRFNEDGTKIALDTKVSKDLFIKILMDDFLTSQLTQFYYESLAKDAVK

SEQ ID NO: 94436 - protein, 185 aa, Proteus mirabilis
MDLYILSLAILFVFFIFITGKIPICFSSQCEFIGFLELLKINVVPIVCIVLLMYAYYAYLRFKYDTKRSVELPVEIIKIDKINYEHLTFLATYIIPLITFDFEKERYILVLAVLLIIMGIIYIKTDLFYANPSLALLGFNIYKVNIKIGKNDIKECVIVITRKKLKIKDKISYIVLDDRVYYSGD

SEQ ID NO: 94437 - protein, 324 aa, Proteus mirabilis
MAVNIPTKESLDIDLQYYVNNINDIAVVVYAIIKGNNVPLRMDIESPAQSGLKSLFLNFIDNEIIKNSELTILPLSSADERNNVLYHYDIELPQELVCINTILENENEQEFDFNTHNIDEIKALLICIGNAENNIILYKTMATVNIFSRDSFFLVKSDTRFKEIKQDFFRVSGNFQLIKVNGELYVIDLSLVEKMFGFHDVIKKEASQGIRSIRNMNLISNIDVIQELIDDVKYARKLTRVAKSSPVIQAGINNSSIISFCKSYPTLKGRIRFNEDDTMITLDTKVSKDLFIKVLMDDFLTSQLTQFYYDSIAKDALIAESVDS

SEQ ID NO: 94438 - protein, 211 aa, Citrobacter freundii
MASTNSNSASYDNIKFKYYLYFLSLWILFLSVSIMSFDWVFIARLVRFILLKYTFEDVFNNFDKLKVRNFVFIFCISMVFSGISSVLYLFSSLSRGWGSTHKVNNVKNQTHEHLEFLTTYVMPLVFTDVNSKRTVINLLLMICFIGVIYVRTNRFYANPSLAILGFRLYKCVIKNDSSGKEYTVICRGKMSNDCQVKIKKIDDDTLIAKLI

SEQ ID NO: 94439 - protein, 335 aa, Citrobacter freundii
MKNELEAFVQSNGLTGEMFFIINDNDNYIYRRVILHDENTEPLITENFKKSITDEIIKRISVNDNGDAIIDNITDMNYEDKGVYCFDIASEDKSTIIKIIEEISSLTVADNPIDFKFNDVNLDNIIGLVYHMSDGDKNIFLYQHRYPNFLHKKSRLSFLGEGDVLVPIPYDMINISKVIDFFVFDGISYAINIKLLEERYGLTQVIDNMVSEVTPKIIEMEIVNKSVLTEPEKIFDDMKDDRGFMRKLARVLKNGILELNIDVNIVNEIKTSFPTIGRNIDLINDGNGIQYIKLTSKARKKAFIRLLNDEAVRSVLTQKPSIAQNHKPEKNITPV

SEQ ID NO: 94440 - protein, 195 aa, Aeromonas hydrophila
MNTKEKIKLYILSLMFLFVMVIFLSINIEPPSSDSELKYNIAIYYILSNWLPILMLFSIIYCEFIRREFDFELNGSASDSLLVIDCKSENYEHLSFLATYIVPFAGLNFDSPLKLLAYLFLLVVIGIIFVRTDKYYTNPTLSIYGYKLYRATLADHVSHYHSVIVITKHDLKKGQNIAYKFISEDVCFARKINND

SEQ ID NO: 94441 - protein, 319 aa, Aeromonas hydrophila
MTRDSIKVDMKKILDTCTGIKVFFIDDDNNELYDSDIESEGLDEFMIGFVNDLKNRFTDNEKLSIPNLSNADDRKNALYYFDFDQRIHEFNYLDKVNDMQANKIIGKYQVKNKGLSSIKAVVIRLKGNDGDVISFYQYIHRTALWTSGKGVFFTTHKTRVVKMTDDVLRLNNNFIFAKIGQSYLINNINAFEKELGFDKIIHAKAEQYCSSIESRGLVNNLEKFNKRLSNETYFARKFVKVFKNSAVIEQELSNEEIISFAMSKPFYENKLKLTEDGGQFDLNSIQRCSYFLQLLDDEFLKSELTGMNYIARAKDRAGS

SEQ ID NO: 94442 - protein, 194 aa, Xanthomonas axonopodis pv. phaseoli
MEFRLLSAFLLFMGSYLPLALILLVQDIPAKIWVMPVCKPWRGDACSFSFFDHPCLAIGGVIVTAFCLAWTMHTLKAVPRRFPVRIEEVKSIPNDLINYVFPYVVSFMGLAYGDPSKIAGFSVFLFVLFLITYRSGQVFLNPMLIVLGWRFYEVKMKLVQSNEVIVARVLKKGLLSIGEERAEAVQDVYIMGDI

SEQ ID NO: 94443 - protein, 307 aa, Xanthomonas axonopodis pv. phaseoli
MTQDAFERFKKFDFDKADVYLWVFKRRSAENEKYTAHHVLIDTTLSETLKGFVKSEKERITEFHPYGHLAQTNENSCLSVGINETNFPILKNLVDRPETQHTVKETKELRRAVGYCVKFVHDGEVVYATRRSPNTWRTAYKKKNMLCMNFVNGGLEAIEGEEFTLDPRFDMFCIGTGILVANKGGFESMMQYRAGYVQAFNHLRTQPEFVALFTDMQPLIDHVGTNAIHLRRMAVIQEKALYADAAFISALKTVAQKHSWAIQFDASNKIIPTPETAALIMKLLLDQRLVSEVTHIMYDVPDAVRVQ

SEQ ID NO: 94444 - protein, 192 aa, Sphingomonas parapaucimobilis NBRC 15100
MQFRLLTAIMVFLGSYLPLAVILFSQNVDYAAWRRAFCWPLESGGCSLPITEAWYSLTLLVVTLVCFGMTILSLALVRPKQDVIVREAEYVPTDLMNYTLPYIVSFMGINYNETSKFVGFCVFLAWMFWITHRSGQILLNPVLIALGWRLYNVTYNFPGSSEQYKGRALVRGYLDPGRYKQWPVQDIQIIKP

SEQ ID NO: 94445 - protein, 307 aa, Sphingomonas parapaucimobilis NBRC 15100
MPIPAALTQFNIQNAGLTVWLFKKSGGGAGSAPTYTGRWITTEPDLDAALKASLIAARARITEVHEYGLLAQNNEASALLIDTVETHAGLIVAQSANPVIQKKVRSEKEVTNTSFFVVRLTDGDKVLLSVRKTDASWRSKQRKGIIDIGFRDNALELDQAPSFSLSKEVDFFIVDDKIIIPHKGNFESVLSYRQAHAEDFTSLKAEPEFTQIFTDLAPLTAFVGDNKIHLRRMCSIRQKGHYKDQNFMAKLRQHHAANSLNLDFDVNGLIVCTEESCSDIITALLDHRLASAFSTNVYDVPDATKIA

SEQ ID NO: 94446 - protein, 173 aa, Sphingomonas parapaucimobilis NBRC 15100
MLNALARILLTSSAIAPVGLTYAWVAYTQNDLRAALYIAIGSLATVAICLMMLRYAKKNLEITLFQASEVEAADRENMGFLLLYLLPLFTSQFNTLNWQLWIPTLGIFAIITATGYNYHFNPLLGILRWHFYKVKSREGVTYVLITKKQIRSAANPISVGQLTEYILIDLEDA

SEQ ID NO: 94447 - protein, 287 aa, Sphingomonas parapaucimobilis NBRC 15100
MNLFALCRPSGALEVKRVALAQPVQAKVGGIFQGQAINFLQNVNEEVEFSGGWKPDDDEILVMNPPAEAAVIAAAQTANPISLPEIDASNFMAEGIRGLFIIDGAGPAQRVLIQAFSAQQLLSRRFTLFQSGNSFKELTEPGFTLDNGIVAILEAGKLKFKSFHRVRGIFDLQQFYREATDQDLDTFSQHSSLEIADVAAFKVVADQGIRKLVHAITKADVLNNHQVAVIAQKAAGLGINVVVQNGKLVVPADRKAIKDLFRFLDDGIYQAALSSSRYVTNSKRLLP

SEQ ID NO: 94448 - protein, 188 aa, Enterococcus faecalis
MLYKLNLYISSYLPLYFLLVYKGWDELNKNGTHEIPTKVVLVYFSVLIILIVLGGGTICCFLRKNPDKTEKIQGSFSSTGDNVISYIMTYLSPMLSIELANFSSLIINLSLFILIGVLYVKNNLIYLNPVLLILGFYIYEWEGNGCKKVIITNMTLSELNASSKEGDYVKARKFENDIWLYKKIKSKK

SEQ ID NO: 94449 - protein, 315 aa, Enterococcus faecalis; identical to SEQ ID NO: 93731

SEQ ID NO: 94450 - protein, 204 aa, Escherichia coli; identical to SEQ ID NO: 93768

SEQ ID NO: 94451 - protein, 340 aa, Escherichia coli; identical to SEQ ID NO: 94081

SEQ ID NO: 94452 - protein, 204 aa, Escherichia coli; identical to SEQ ID NO: 93768

SEQ ID NO: 94453 - protein, 340 aa, Escherichia coli; identical to SEQ ID NO: 94081

SEQ ID NO: 94454 - protein, 204 aa, Escherichia coli; identical to SEQ ID NO: 93768

SEQ ID NO: 94455 - protein, 340 aa, Escherichia coli; identical to SEQ ID NO: 94081

SEQ ID NO: 94456 - protein, 203 aa, Listeria monocytogenes SHL011; identical to SEQ ID NO: 94338

SEQ ID NO: 94457 - protein, 313 aa, Listeria monocytogenes SHL011; identical to SEQ ID NO: 94339

SEQ ID NO: 94458 - protein, 177 aa, archaeon GW2011_AR13
MAGIKLWVKFLMFVSSFSPLMIIWGFEFKEIFFWKLSIFHITLIISLISIVSLVSIIESSRRDNNPQRLKINSIEDMNKVHIEYLLTYVFVFLPTSNISIFSFLVFIMVLLIVYLKSNLIYVNPVLSLLFYDVVKLKSEDEEIILITRRKDNLIKNENIKISILSKDVFVETKENER

SEQ ID NO: 94459 - protein, 324 aa, archaeon GW2011_AR13
MKDKINNLRSNLEKEEITINLYTLNRKYQVKSLEKKYVVNFATIKGDSKDYILETIKNFLKNNSEKIKETQDYFDFNIEDGDYYLSISSDKVNEFEFVRNKMKAKSRLPALNKLTNKTTVLAIELIIEDNQYVFFQKVDISPRMKRKFTSMILKNGVFNKIVEPKSEELEFPPYFTFLYFEDSKEFLIFNKRKFEQSFDFRKFYKDNSEKAILNLEGKKFIFSKELKEGSLTQPRYMAKFTKILLCKGIENLEKRDLTPYEKEFGIKIQKDEKGNFLIKTEEDLDGLLKILQKECVVEVSTREKFFSKSKISVTNLLNKINPFK

SEQ ID NO: 94460 - protein, 214 aa, Salmonella enterica subsp. enterica
MYVLSLFFLFIPIIFYFSGIDDVWNVFTKANGFCDGVSNRIVCITGNMGNQLSLSVSRLCVCIFLVFLCGYTYWWYKRQLSFLDRGITSAEVVVVGCEKESTEYLSFLSTYIMPLVFTDLTKPSNVFNFIFILVIVGFLHIKTRRIHSNPTLSLFGVSAYKIDYIIRVDGQDSDITKGLIVLSKDEISVKSVIRIIKKEDYITFAKYIRNDSNG

SEQ ID NO: 94461 - protein, 381 aa, Salmonella enterica subsp. enterica
MAEEKLDLSELHHDAQKASELSSYYSHFDTKVEDFDLHVYFNFRHKIKDGDGKYRYEYRVAKIDDTTVLKESIKDNVITKTLNDLSSGGVAVSDIKQLSDRASTISFLEDAKSYKDEQMSFLTGIIFDKGFGGDGDIPVVNFEKFDKISKVDSIVFVLRKGDKCITIYKKQYPIQNLTKKKNHYFLYSKDTLSKIDADMISIDGKASIVFVKGTAYIYDQDVFEKFFGYKKWIKKVAGEFVSEMKQKFSSIVDFGKVTDRLEKESADADAFSRKLARIYNNKDLRASFNTVTPEKISDFLVENEYFARLLKYKSAEEPLEVSTHDQQEAFILIVSEGVLRSLITGFDYLSPAAKRKIATGQTAQKPSSVVTRIPSSASDAA

SEQ ID NO: 94462 - protein, 196 aa, Novosphingobium subterraneum
MQFRLITALIVFIGSYLPLSLILLAQNFDFSAVRNQFCWPINENACVIPIKSPIFSIGLFSLTLLCLGVTLVALRAIRPSIDVEVIEAEYVPTDLMNYTLPYVVSFMSIDYQETGKFIGFLVFLVWMFWITYRAGQVILNPVLIALGWRLYTISYRFAGSPNVFKTSALSKGHLNPGSHKQYPLQEIQIMKPEVPA

SEQ ID NO: 94463 - protein, 307 aa, Novosphingobium subterraneum
MPLPQKFADFDIPNAGVTVWLFKKSGGAGGVAPVFTGHWIATTDELEAALKEAIAEARDAIEEVNPYNLLAQNNEASVLNIGTLETHADRIVAASADALQQRKVRNLRQIQNTDFYVIKLTSGGDVLHAVRKTDASWRSSRRGNYIDVLFRDEGLELDDAPQFSLSKYVDFFIVDDQILIKEKNKFESIVSYRQAHENDFAELQAEPLFAGLFTDLAPLVAFVGTNKIQLRRICAIRQKGHYQDQAFMARLRQHHAEYQLNLVFDANGRIQPTDETCSDIITALLDHRLSSAFSENVYNVPDATQVN

SEQ ID NO: 94464 - protein, 199 aa, Pectobacterium carotovorum subsp. carotovorum
MKRKSTFNKMGLYILSLMLLFVFIIILSAKIPFCYGSTCHFIGFYQLAFSNIIPIICLIFIGIAFYFYRRFKGLTKVNNADCVTITACQSESYESLTFLATYIVPFMGFSFDDPQKNLAYFLLIVVIGLIFIKTDKYYANPTLAIFGYKLYRVNISYSGSSEVKNVIAISMDVLTVGDQVLYSFFDDYVFIARKKDESR

SEQ ID NO: 94465 - protein, 319 aa, Pectobacterium carotovorum subsp. carotovorum
MNPDDLKVEINSIFENYSGIRVIFIVKNEENYSLKLSKIDNKAFPKIIEGFKLSLSQDIIENEDLTIPQLSNFDDRKNALFLFDYEQKPLEFDFITSAIEIPPNSQDFYNYEDKFRNIKGIIIQIRGNNKCLSLYKNKTPITVFEQSRKVFNLVPDPDGFLKELPEQVFRLDFNYDLILLDDNFIIKNLTTLERTMKFHEVIQAQSVIALTALKESNLIEDLSHLEKSSSEMSFSRKLAKISKHSPVLGKIDVPVIIEYVKQHSFLSTVMIVSDDGNTLIVKTKRSQKHFIKLLSDDYLESPLTKILYDSLAKDELKAN

SEQ ID NO: 94466 - protein, 199 aa, Pectobacterium carotovorum subsp. carotovorum; identical to SEQ ID NO: 94464

SEQ ID NO: 94467 - protein, 319 aa, Pectobacterium carotovorum subsp. carotovorum; identical to SEQ ID NO: 94465

SEQ ID NO: 94468 - protein, 194 aa, Xanthomonas axonopodis pv. phaseoli; identical to SEQ ID NO: 94442

SEQ ID NO: 94469 - protein, 307 aa, Xanthomonas axonopodis pv. phaseoli; identical to SEQ ID NO: 94443

SEQ ID NO: 94470 - protein, 172 aa, Klebsiella variicola; identical to SEQ ID NO: 93926

SEQ ID NO: 94471 - protein, 297 aa, Klebsiella variicola
MELFAITDSEIPTRIIKIDIDAPAQTVVENLFRTQRSEFINEDIEEIDFCASYNVQDGEIFSINPFDDEIGIINAIERPDAVPVWDPDDVSVHYFKALFTGEPTSNGNPTQVWLQCFDRRQIINNEKSFFQVVTQPGNRFSVSTRPGFSLSDRLTAILVGDKLLFKSFFMLRRFFNMEEYFNEATREDLDNFIGNDIFHVENAEDFMTFADSAIKKKVSLIISSGILNDQPIENLIECAQKIGYQLGITNVNGDNKITMPNSKREVKQLLYFLDQGYFNSIITNELMLTNSKRPIRI

SEQ ID NO: 94472 - protein, 171 aa, Pandoraea sputorum
MLSGFAKFLLALTALSPVALTWAIADYSRRGFVSDQLFAISISLILAVGCAALLRVSRKRLTKVTFAVDELKAVDNEVVAYIVTYLFPLVAPATDISLLAQGFVLALLALVLSTSNAFTFNPVLSLLGYHFYEVKCASGVSYLLLSRNDITDVRVIKKVGRLSRHLMLDLS

SEQ ID NO: 94473 - protein, 291 aa, Pandoraea sputorum
MDFFALVGGHLPAVYRLDLQQDLQNRLDQMFVDHSEQLLNPDLVAVPFERENFHPDDSEILEINPFDLPDLIFDPIENAIGWPVLPNDPDVLSRVYCVFAHDDGSDRVIFQVINKAQRLNTSAINIILRGNVFSRLEEPGLMLANACHAVYQNNALRFKSIWWLKQIFDIGDYYRAATEADVDAFSRLENVSVENLDALKNRSGQWVRTRLAYIVDSGVLEQCPPERLVEKAAEFNVDLQCVNENGRQKLLIPEAPRQLRKVLKFLEEEYYAGPITGAAYEANSKRRRGQD

SEQ ID NO: 94474 - protein, 170 aa, Geobacter soli
MLSRLLKTYFVATALSPICFSLAYIAYQRKNSIELCALFVSIAVLLGASSFKIIELAKTKLEILPVTIKKAKSTDKEVIGFFVAYVLPIVFKNSNFDAGSMTMFVLLLAFVIWGTHSFQVNPLLGVFGYHFYEVDTESGITFVLVTKKKIVNIKSIGRVVQLTEYMVLEV

SEQ ID NO: 94475 - protein, 295 aa, Geobacter soli
MPGVLMNLFALTNVPENRVARIPLSRELQEEITALFLQQEQSFTSDIEEEIKFDGKYRPEEKELLFIEDFDDVDGICTAIRNPTGCQELEVTCQGLESIKAIFSGYAKDDTVTALLQAFDRKRIISTKGFAMFHSGNTFTKFDGSGLTLDNKLTAVMTGNTLRFQSFHYVRQVFDMSGYYKEATNQDVTDFCHHAALAVGSEQEFLGVADSWVRRKIGLIQQSGILDRYSPTQIADVARMFQIGLTIENREGVDKIVLPMARPDLKRILRFLDEDYYEAPLTTTRYLSNSKRVAD

SEQ ID NO: 94476 - protein, 194 aa, Xanthomonas citri subsp. citri A306; identical to SEQ ID NO: 93946

SEQ ID NO: 94477 - protein, 309 aa, Xanthomonas citri subsp. citri A306; identical to SEQ ID NO: 93687

SEQ ID NO: 94478 - protein, 194 aa, Xanthomonas axonopodis pv. phaseoli; identical to SEQ ID NO: 94442

SEQ ID NO: 94479 - protein, 307 aa, Xanthomonas axonopodis pv. phaseoli; identical to SEQ ID NO: 94443

SEQ ID NO: 94480 - protein, 211 aa, Escherichia coli C691-71 (14b); identical to SEQ ID NO: 93972

SEQ ID NO: 94481 - protein, 335 aa, Escherichia coli C691-71 (14b); identical to SEQ ID NO: 93879

SEQ ID NO: 94482 - protein, 169 aa, Aeromonas hydrophila J-1; identical to SEQ ID NO: 94018

SEQ ID NO: 94483 - protein, 295 aa, Aeromonas hydrophila J-1; identical to SEQ ID NO: 94019

SEQ ID NO: 94484 - protein, 194 aa, Xanthomonas citri pv. citri
MQFQFWSAVLLFLGSYLPLAVILMVQDIATKYWSAPLCGWKGQWNCQFQILAHPWLAWGTVAVTFGALLLMVVALRSVRLPHRVHVQEVKAIPNDLINYVLPYVVSFMGLSYADPQKLGGFLVFWVVLFLITYRSGQILMNPLLIVLGWKLYEVKVGLGQSGAIRMARVLKKGPLVPSIQMAEEIQDVYLMRDP

SEQ ID NO: 94485 - protein, 309 aa, Xanthomonas citri pv. citri; identical to SEQ ID NO: 93687

SEQ ID NO: 94486 - protein, 194 aa, Xanthomonas citri pv. citri; identical to SEQ ID NO: 94484

SEQ ID NO: 94487 - protein, 309 aa, Xanthomonas citri pv. citri; identical to SEQ ID NO: 93687

SEQ ID NO: 94488 - protein, 194 aa, Xanthomonas citri pv. citri; identical to SEQ ID NO: 94484

SEQ ID NO: 94489 - protein, 309 aa, Xanthomonas citri pv. citri
MTDQALQALQEFDLDSAGVHLWVFKSSTKADRFSASFVRIDAALEDALRNFAKAERAMMTEWIPYGHLAQPTENGCLSVSAIETDFALLQALVDRPELEHAIESKDQLKNAIGYLVKFSQEERVLYALRRSPATWKTGYRRKGVVNMLFQNGELSAVEGVDFTLEPGFDLFALDEALLVGNKRAFESMMRYRAGFVNAFGELQDEKQFVSLFTDMAPLVTYVGSNGTHLRRMAVIQERKLYDNPRYLGALREVCEKYQWGVQFDKDGLIIPTKETAAVIMKLLLDQRLISEITAIMYDVPNGHRVDAVE

SEQ ID NO: 94490 - protein, 194 aa, Xanthomonas citri pv. citri; identical to SEQ ID NO: 94484

SEQ ID NO: 94491 - protein, 309 aa, Xanthomonas citri pv. citri; identical to SEQ ID NO: 93687

SEQ ID NO: 94492 - protein, 194 aa, Xanthomonas citri pv. citri; identical to SEQ ID NO: 93946

SEQ ID NO: 94493 - protein, 309 aa, Xanthomonas citri pv. citri; identical to SEQ ID NO: 93687

SEQ ID NO: 94494 - protein, 194 aa, Xanthomonas citri pv. citri; identical to SEQ ID NO: 94484

SEQ ID NO: 94495 - protein, 309 aa, Xanthomonas citri pv. citri; identical to SEQ ID NO: 94489

SEQ ID NO: 94496 - protein, 194 aa, Xanthomonas citri pv. citri; identical to SEQ ID NO: 94484

SEQ ID NO: 94497 - protein, 258 aa, Xanthomonas citri pv. citri
MTDQALQALQEFDLDSAGVHLWVFKSSTKADRFSASFVRIDAALEDALRNFAKAERAMMTEWIPYGHLAQPTENGCLSVSAIETDFALLQALVDRPELEHAIESKDQLKNAIGYLVKFSQEERVLYALRRSPATWKTAYRRKGVVNMLFQNGELSAVEGVDFTLEPGFDLFALDEALLVGNKRAFESMMRYRAGFVNAFGELQDEKQFVSLFTDMAPLVTYVGSNGTHLRRMAVIQERKLYDNPRYLGALREVCEKYQ

SEQ ID NO: 94498 - protein, 194 aa, Xanthomonas citri pv. citri; identical to SEQ ID NO: 94484

SEQ ID NO: 94499 - protein, 258 aa, Xanthomonas citri pv. citri; identical to SEQ ID NO: 94497

SEQ ID NO: 94500 - protein, 194 aa, Xanthomonas citri pv. citri; identical to SEQ ID NO: 94484

SEQ ID NO: 94501 - protein, 309 aa, Xanthomonas citri pv. citri; identical to SEQ ID NO: 93687

SEQ ID NO: 94502 - protein, 194 aa, Xanthomonas citri pv. citri; identical to SEQ ID NO: 94484

SEQ ID NO: 94503 - protein, 309 aa, Xanthomonas citri pv. citri
MTDQALQALQEFDLDSAGVHLWVFKSSTKADRFSASFVRIDAALEDALRNFAKAGRAMMTEWIPYGHLAQPTENGCLSVSAIETDFALLQALVDRPELEHAIESKDQLKNAIGYLVKFSQEERVLYALRRSPATWKTAYRRKGVVNMLFQNGELSAVEGVDFTLEPGFDLFALDEALLVGNKRAFESMMRYRAGFVNAFGELQDEKQFVSLFTDMAPLVTYVGSNGTHLRRMAVIQERKLYDNPRYLGALREVCEKYQWGVQFDKDGLIIPTKETAAVIMKLLLDQRLISEITAIMYDVPNGHRVDAVE

SEQ ID NO: 94504 - protein, 194 aa, Xanthomonas citri pv. citri; identical to SEQ ID NO: 94484

SEQ ID NO: 94505 - protein, 309 aa, Xanthomonas citri pv. citri; identical to SEQ ID NO: 93687

SEQ ID NO: 94506 - protein, 194 aa, Xanthomonas citri pv. citri; identical to SEQ ID NO: 94484

SEQ ID NO: 94507 - protein, 309 aa, Xanthomonas citri pv. citri; identical to SEQ ID NO: 94489

SEQ ID NO: 94508 - protein, 194 aa, Xanthomonas citri pv. citri; identical to SEQ ID NO: 94484

SEQ ID NO: 94509 - protein, 258 aa, Xanthomonas citri pv. citri; identical to SEQ ID NO: 94497

SEQ ID NO: 94510 - protein, 194 aa, Xanthomonas citri pv. citri; identical to SEQ ID NO: 94484

SEQ ID NO: 94511 - protein, 258 aa, Xanthomonas citri pv. citri; identical to SEQ ID NO: 94497

SEQ ID NO: 94512 - protein, 194 aa, Xanthomonas citri pv. citri; identical to SEQ ID NO: 94484

SEQ ID NO: 94513 - protein, 309 aa, Xanthomonas citri pv. citri; identical to SEQ ID NO: 94489

SEQ ID NO: 94514 - protein, 194 aa, Xanthomonas citri pv. citri; identical to SEQ ID NO: 94484

SEQ ID NO: 94515 - protein, 309 aa, Xanthomonas citri pv. citri; identical to SEQ ID NO: 94489

SEQ ID NO: 94516 - protein, 194 aa, Xanthomonas citri pv. citri; identical to SEQ ID NO: 94484

SEQ ID NO: 94517 - protein, 258 aa, Xanthomonas citri pv. citri; identical to SEQ ID NO: 94497

SEQ ID NO: 94518 - protein, 190 aa, Klebsiella variicola
MINAILFLYTDINADKEDYMLNKLAKYLLTASSVAPVFFTLAFLSYISKHYKFMIAYLSLGVTILLLCVLIVKYAINHNSVTNKKLTNASPADKEITNYFLTYLFPLISGPEAFMDVRIASFFALSLFFYISFSGSYSFNPLLSFWGYKYYEAEDDTGVSFVVLSKKPLLKASSNRINLIKLTDYTYIAI

SEQ ID NO: 94519 - protein, 297 aa, Klebsiella variicola; identical to SEQ ID NO: 93759

SEQ ID NO: 94520 - protein, 194 aa, Xanthomonas citri pv. citri; identical to SEQ ID NO: 94484

SEQ ID NO: 94521 - protein, 309 aa, Xanthomonas citri pv. citri; identical to SEQ ID NO: 94489

SEQ ID NO: 94522 - protein, 190 aa, Flavobacterium psychrophilum; identical to SEQ ID NO: 94410

SEQ ID NO: 94523 - protein, 280 aa, Flavobacterium psychrophilum; identical to SEQ ID NO: 94411

SEQ ID NO: 94524 - protein, 190 aa, Flavobacterium psychrophilum; identical to SEQ ID NO: 94410

SEQ ID NO: 94525 - protein, 280 aa, Flavobacterium psychrophilum; identical to SEQ ID NO: 94411

SEQ ID NO: 94526 - protein, 190 aa, Flavobacterium psychrophilum; identical to SEQ ID NO: 94410

SEQ ID NO: 94527 - protein, 280 aa, Flavobacterium psychrophilum; identical to SEQ ID NO: 94411

SEQ ID NO: 94528 - protein, 201 aa, Myroides profundi
MNSSTKLYGVAEFVLFITSYIPLFILILFKQFSENIDFLNWGGINIESLWFFATKFLFSTFLIIISILSLIGCKLLFLNFEKNINNGENVTLVDLKNRNNESIGYIATYIIPFIFQSFSSWYEIFAFFFLMLIIYRIYVNSNLLLINPILSFKYSIFEIEYEEQNGKKRNGLIIIKDKQLEEDSIITIYSIGHKLFYAQKN

SEQ ID NO: 94529 - protein, 339 aa, Myroides profundi
MTIKEISEKIASTESTDLRLYFISRILKDNIKKNAKVIDKYVYKVYQVDIDSEIRNYLFSLTNEELRKIIKKDFEMLDYDVISDDTQHLFTYSMHNKVFSFSDVVFNQLKKNPPKMQSIESILSNDDELWAYCVGFNDLESKDWIYTFRKILSGKVAVDEKEGKNILKTIRTYFDTKNQKLELIKGETVNLDKQIDCIYYEETFYVIKKINFENIVGLQEEYKKESKSVVEELRKTGKIHGLEIIEDKIESTPSIHKKLIKIAKIGNYRSLDDKTIRKMKTVCKKYNVALNVKDGKLTIENESDIDTILKMLADYYKTGEVSGKAYGTFSGKELTRSQE

SEQ ID NO: 94530 - protein, 172 aa, Yersinia intermedia
MLNGFARYALTASSVAPVCLTLAFLAFINDNYKILGFSILLAFISVIFCVFIIKQAQKYNPVTLKNLESASPADKEITNYFLTYLFPLISGPTTFMDWRLALFFYLSLFFYIKHSSSYSFNPILSIIFGFKFYEAEDDTGVSFVLLSKKPLTNAKIKGLRVKKLTEHTYLIV

SEQ ID NO: 94531 - protein, 297 aa, Yersinia intermedia
MELFAITDSEIPTRIIKIDIDAPAQTLVETLFRTQKSEFLNDEVEEIEFCASYNVQDGEVFSINQFDDEIGIVNAIERPDAVPVWDPDDVSVHYFKALFTGEPASNGNATQVWLQCFDRRQIINNEKSFFQVVTQPGNRFSVSTRPGFSLSDRLTAILIGDKLLFKSFFMLRRFFNMEEYFNEATREDLANFIGDDIFHVENAENFMIFADSAIKKKVSLIINSGILNDQPIDNLIECAQKIGYQLGITNVNGDDKITMPNSKREVKQLLYFLDQGYFNSIITNELMLTNSKRPIRI

SEQ ID NO: 94532 - protein, 211 aa, Yersinia enterocolitica; identical to SEQ ID NO: 93800

SEQ ID NO: 94533 - protein, 335 aa, Yersinia enterocolitica; identical to SEQ ID NO: 93801

SEQ ID NO: 94534 - protein, 197 aa, Pseudomonas fluorescens
MELRLVFAAAIFLGSYLPLSIILLVQDLKVELISRPFCSTLSRMSSECELPFNNSGLAIGFVLCCLVCFLTTIFVIWCKQEPQSITIIESKQIPTDLINYVVPYIVSFMSLEYSLLTKVMGFALFMVWVFWLSYKTGQVVLNPILIILGWKLYEIKYTYQNSPTERVDKALAKTEFRPAARAYIDVEFIQEVIVKRD

SEQ ID NO: 94535 - protein, 308 aa, Pseudomonas fluorescens
MAVLQDLHDFDLEQATVNFWIFKRYTKGTPPEPKYTGKWVSLDNDLKVALRSTAAAFKAALTETLEYGLLAENNQSSALTIPQDETHAAKFVAESHDQTPAKRISKMEELANAEFYVVKFSSAQGNLYCVRKTDSTWKTKKRAGAIHTFFKSKTLKLDEAPSFHIAKDFDMAVLNDTIFIKHKPSFESILSHKAAHQDDFTQLLAHADFQALFTTTDVVSAYVGTNAMQLRRACAIKMKGHYLDARFMGNLRREYANFGLNIPFQADGKIAPTPESCPDIFKALLDHRLKSHFSEKIYDVQNTAETGV

SEQ ID NO: 94536 - protein, 194 aa, Streptococcus equi subsp. zooepidemicus Sz105
MKNGYTSKWLLFITSYLPLYFWLLFSSVDYTQLDFSKYKLETLKSFPNIFRLILLCLIIISLVEIINLFIGSGSEIKTLPKDMEISPESDSLMNYVVTYFTPLLSFDLNDMKSVMMNVLLFLLIGLMYVGSSATYLNPVLGVFGFKIFGVSGFPHAHHIISSFSFDEIETIKNRGDDVIRYRLGDGIYVIKGKK

SEQ ID NO: 94537 - protein, 323 aa, Streptococcus equi subsp. zooepidemicus Sz105
MSVFDLNEVISDLVSLNQQQSFEQKIEIFLLVVKKKENEIYKQESDNRTKRVLFESLKSELEKSRFKNREVMAYDAVFSKKNTHELVNVGDYENIATKLEEFNDENNYLTSTHGMNEKKFHMYMISLKTDNHKYKVFGNFSNVLELKKKFIFGNFSDSRIEFSDSNNIVGFSKKIELLVVDDKYILINQAEAKFESVFKMNALFSGQATKILEDNEKIKSIFSDTTRNKLIDKVKSGKRMATRLIKITSDIDRFNKTVDNIKKIEEIIKDDTHAFYDKVKDVVYFEGQLTVPDGKEVQLLNAISDAFYHAIFSETDNVDESRM

SEQ ID NO: 94538 - protein, 195 aa, Vibrio parahaemolyticus EN9701072; identical to SEQ ID NO: 94306

SEQ ID NO: 94539 - protein, 328 aa, Vibrio parahaemolyticus EN9701072; identical to SEQ ID NO: 94307

SEQ ID NO: 94540 - protein, 195 aa, Vibrio parahaemolyticus 3644; identical to SEQ ID NO: 94306

SEQ ID NO: 94541 - protein, 328 aa, Vibrio parahaemolyticus 3644; identical to SEQ ID NO: 94307

SEQ ID NO: 94542 - protein, 189 aa, Raoultella ornithinolytica
MRRKVDLYILSLAILFVFFIFITCKFPVCFSSQCKFIGWEVLLKNNIVPAICIILLLYSFFAYYRFKYDTKKSVELPVKIVKLEKINYEHLTFLATYIIPLITFDFEKERYILVLAALLVIMGVIYIKTDLFYANPSLALLGFNIYKVDINISGNVIREGVIVITRRKLEAGKMFSYIVLDDRVYYSGN

SEQ ID NO: 94543 - protein, 262 aa, Raoultella ornithinolytica
MTTQAVTKERLDTDLQYYINNKDDVAVIVYAIVKGNNAPLRMDIESPAQNGLKSLFLNVINNDILKNEDLTVLPLSSVDERSKVLYHYDIPIPDELKCLNQALGQPDEPEFDFNVHKLEDIKVLLICIGNAERKMTLYKTMAPVNIFSRDGFFLMKSDTRLKEIKEDFFRVSGNFQIIKISGELFVVDLLLIEKMFGFHDVIKKEAARGMQSVSDMNILTNMDALHELINDVKYARKLTRVAKASPVINAGIDNVRICLLYT

SEQ ID NO: 94544 - protein, 202 aa, Escherichia coli; identical to SEQ ID NO: 93706

SEQ ID NO: 94545 - protein, 327 aa, Escherichia coli; identical to SEQ ID NO: 94289

SEQ ID NO: 94546 - protein, 202 aa, Escherichia coli; identical to SEQ ID NO: 93706

SEQ ID NO: 94547 - protein, 327 aa, Escherichia coli; identical to SEQ ID NO: 94289

SEQ ID NO: 94548 - protein, 202 aa, Escherichia coli; identical to SEQ ID NO: 93706

SEQ ID NO: 94549 - protein, 327 aa, Escherichia coli; identical to SEQ ID NO: 94289

SEQ ID NO: 94550 - protein, 214 aa, Escherichia coli
MTSTNSNSASCDNIKFKYYLYFLSLWILFLSVSIMSFDWVFIERLVRFILLKYTFEDVFNNFNNFNKLKVRNFVFIFCISMVFSGISSVVYLFSSLSRGWGSTHKVSNVKNQTHEHLEFLTTYVMPLVFTDVNSKRTVINLLLMICFIGVIYVRTNRFYANPSLAILGFRLYKCVIKNDPSGKEYTVICRGKMSNDCQVKIKKIDDDTLIAKLI

SEQ ID NO: 94551 - protein, 335 aa, Escherichia coli; identical to SEQ ID NO: 93879

SEQ ID NO: 94552 - protein, 171 aa, Bradyrhizobium sp. LTSP849
MRNTLKTVLFVAAFSPALISVGVARLFGGSPFWDAIYYVAAGLIGSLMVVYVLTALKWRGEEFPFAVRKIESNDVLLLGVVVTYIFPFLARASDITVGAILLIGCVVWVVFWLTDATIPSPLMRLVGYRFYKAESANGMVYTLITRREIFDPRDVKTVKRISGSMLLEIVE

SEQ ID NO: 94553 - protein, 281 aa, Bradyrhizobium sp. LTSP849
MSDRRIVRIPLTADVQREMDEIFSGQERRFRTSSEEQIPFDGKYKPDDGECLFIDEYDDIDGLHEAIATPLGIPQIAADAAEFEMIRALFMGKTHEGRRIALVQNFDKRRILSNKGFAIFHSADVFKKVEGVGLTIGANLSAILEDDRLSFFNFHSARQIFDLTQYFREATDEDLNDFATSEALKINDLATFIATSDNWIRRKVALVMQSGILERIDFEATKASALVFGINIDTEANGDKLALVLPTKKAELKKLLRFLDEDYFQSVLSSTPHLSNSKRRV

SEQ ID NO: 94554 - protein, 194 aa, Peptoclostridium difficile
MNRLNYLNMRIKMFISSYLPLYLILLTIYSDKINSFDKIKLIIRFEDKIVSLFIIAVFILVIISFRTLIDLRRTKGNENHKFEFFNKTEDTIISYMMTYIVPILSTDFLSTKTMTINLILYSLIGLMYIKLNLIYLNPLWLLFGYSVYKSDNEVVIITNIPYGRLKTLRNTNLKSSYLGNDIYLIQRSENDNIN

SEQ ID NO: 94555 - protein, 307 aa, Peptoclostridium difficile
MNIREIMNILKLERSEVRLYFTMKRGINYISYSPTIEDGLQDYLKNLVCEYLLRFEDIEQVMFSPIGYKDETIETCDIEYIGCYEKVIESYREENLSRDNIENNIINKLNFYCLNIKFEENNQEKEINFFRRVTKFKKLSSKGFMGFIKNNRFKKLDSNLLGLDGFIDIAIYGQDVLIFNHISLERIFSIADQYLEKAQNTIDIIRDINRIDNFEQFEEDCLNDRRITRTLTKMLSEEARLENCFDNFANVVNAIDLFQLDINIDRNGERDKVIYENKEQLMDIIRLVRDSYYKSIIHDRKGIDDSI

SEQ ID NO: 94556 - protein, 197 aa, Citrobacter koseri; identical to SEQ ID NO: 93954

SEQ ID NO: 94557 - protein, 323 aa, Citrobacter koseri
MFTNIENISKSKRISGEAFFVADVQGTIDIFKVNLEPDAEKDLTTSFSKSLINNIIEPNRGKVAVPLVSTLLERDKQVFEYDHLAINHLPIEFTKMNNVLNFGVNGNATQFDFATQSLTSVKAVIYHLCDGNGNSVVIYQHKYPVSLHKKTKKSFLSLNGRTLDKITHDSIDINDTIDFFFFQNKYYALNIKLLERMYGLESVIDNLANNSTPLIINLGIVNTQGMPVPLDIFKDMYKDRAFMRRLAMVSKGNLVKTGVSVPQIQQVMQKFPVFQRNIDLTGGLINLNTKDQKRYFIRLLNNEASFAALDNSPFLAVEKDSAA

SEQ ID NO: 94558 - protein, 192 aa, Desulfitobacterium hafniense
MTIFYKWLLFISSYTPLYVLLAIDNYNFKCTPIAYFKGVLDDTSLLVFWIVIITLFVISILSVSYFVFISLNDTRVAEDVKPINESVLSYLITYVIPLINMNVNSVNSLLVNLLLFLVIGVVYVKSDLIYLNILLILLGFRVYNDPRGNVIITNYSRDELISSVNTMELLSYRNVVKGVYLVRRKKEKNKKQ

SEQ ID NO: 94559 - protein, 303 aa, Desulfitobacterium hafniense
MALENIIEMLEGVSEDPAGKVSLYFTRKDYKCNYTSFKPSISIPLQKELLNIANEALKELSKRAVTTFNPTGSLDDTLEVIDYVYVDSLSHILESLKEERLLTDIPDDISKFNFYCLVIKFGQDDNILLFRRLTRFKKLQKGIVGRFISGEFEKIDAELLGIDNFIDIIGCNNELTVAAHISMERIFDIKTQYQENAKRTLEIIKETNKIENFDQFQEDSINDGRIIRGLTKLLKEPERVKKSLEKMDKIKDLVNLVELDIKFTDDGKMLYERKDQLQNITLIIRDAYYQSYINERLGVDEMA

SEQ ID NO: 94560 - protein, 185 aa, Candidatus Brocadia sinica JPN1
MKLRLFPSIVIFLSSYSPLALILIVKDFDLNSYPFKHPYFAFGVLIIAILSVVALFFVIKNIKSGFHIKIEKISNCSNELINYTIPYIVSFLGLDLSRLHDIAAFSIFMILLCLLTIKTQSLFINPILAVWGYGLYDIQFTENNVLKNGIFLSKHDLSIGKSYRIQKLSKFMYIITGIIEEGQNE

SEQ ID NO: 94561 - protein, 311 aa, Candidatus Brocadia sinica JPN1
MSSTPKGKLKKMKSLDLDNASVFLWIIKRKLKDKKADYSVLNAEIENKLSEKLKKIVKEKFGSCNQLRDYSHLTEDQDDDVLTLNYKETDFPQIFLKIQKGSDNPKVEKTEDLFGTWAYVIEIKHDFQLLTFTKVPETWDLKKKKGLMNLIFIENKFKDLEDNSIFRIQRKIDFFCFEDIIFVLDKKKFETGLNFREGMKANRDEVLKDFEAFGIIDDIEKLRERVGENMKYLRKISMIKNNGYYKNEDFITRLIQVNMKEKWGLKIEANKIIITEDNFNDVLTILNNDRLKSPITEETFDVHVKRSLGRG

SEQ ID NO: 94562 - protein, 205 aa, Photobacterium leiognathi
MITTRSQETNVKLWVEILIFLCSYYPLFLILFIKDINNNTDGIPFGLIQWGLNISIWSLIGLLISSVATLCTGFIMRTLFIRSEGVDEIRLTKVRAIRGDMINYTLPFLIGLFAFDYKSWQSILSLIVFLVFMFAFTRNEKIILLNPMFLLLGIRLYDIEYKKVGQPNIEHSASALCMGTASKSEQKVRFLENSGINFISALVDR

SEQ ID NO: 94563 - protein, 345 aa, Photobacterium leiognathi
MANNKSNIVEALQEEVQHELDQASLDKKLADLRAIDLSKATVNLWVTNVKVSNKSKRFGDIKNLKVHSEYQEHFRQYVIHCIKGTEHIEELRPITTIQDNRFFYVESSSTDLTQLIEQVENGELTTITQETELNNYNAYVIQLTFDEPEKNIYAFRYIKGAWSLNNTANKTLRTSYQNNRLVVEIDQSNKFQITPYVDFIQYESSVFIADLTQFETAMNYHERLKEKKAETISALGKSFAMNADESNKLISIIGDDKRLMRQLASVYEKQHFNNELWLRKLRDAADEAGNWQIKFDDDGKIKVIEKKEYVKELLVLLQNKRVKTVVDGLMFDVEGELVTIQPIQP

SEQ ID NO: 94564 - protein, 199 aa, Clostridium sordellii
MKKSVKWLLFISSYIPLFIILIFTNIDFKSTYNFIQYILTNRCEFILKNIKFQDIYLWILIILCITCLVLVKIVIIQSRGFEDNKKIIDIEPNNNSILEYFVTYLLTLSSSGFSFKEVFIFWFILYIIGHLYIKNNQFHINPTLCLLFKYNIYKVKTENSKECFILSKLNEYEFNSYLNSNIQVTLLSEGFKGNIYLYK

SEQ ID NO: 94565 - protein, 335 aa, Clostridium sordellii
MENTLNIEDIKGRIKSIHLLLLKKNTNFSNGLEPLKAYIKNDIFDDIKKIYIKPLESIFSNCELENFSYDSSLDGAIPFLSTSELTHSSVFSSLLNSISSIDSIKSLKTFENTLSESYLYAFIFTLDDSKTFTVVRKIYALNYLKNKGLLTFKDSRLNFIQDDLFALDPKIDCIIYDNSVYVTGKHNFETMFSYNYHYTTKATITLDSIKSSNILSNFDEFKLDCLDRSTITRKLAELCVHGDINIFIDKLKNNSKSIEKTIEKYNLDISLKDNKIVYSDVSSLSEIINLISDNYFKGDITNDIYLARGKSRLSSGKSNPKKRTTTKKRKSRKSN

SEQ ID NO: 94566 - protein, 176 aa, Defluviitoga tunisiensis
MLSKISRVLLFLLSYLPLFLIYAINGVIHGEFVVFCSFLFVILVVSVLCFLMFRSLKKRGKKRSLIVESNELVNNMLIEYIFVYIFPFISAFDKREIVSFLILFVIIGSIYIKSDLIAVNPTLSLLGYSIYKVSYRYEDDVSRVREGYLISRGLDDAGVKVEMSKGVFIHFRSKKK

SEQ ID NO: 94567 - protein, 311 aa, Defluviitoga tunisiensis
MNEICQILENNTVSQPVEICLHKDGKLFDLTCDDASFFEEIIVNSVREFVKELESDDLVEVQSYEDSIYDKRFLYLEKQEVPQVVDIESRLLSGTSLYRLDKSVFKDYKNFDIIVKYFYREIGANIIGFQELDSRHIFDVKRLFFLDSANLKSRDRGIILKPKEFFDYFVVGDILFIRSVYYFENKFQFFKKYVTSKDEFVKEIKVNNNVLGRDIRLKGIDYFDKYVSERKTFLKKLHGIYKKGNYVNFEFEKLKEVITNFNLKINLVESNNEIVLDEKTSIKDFLDLLSELYYVSLLSEDRLKANESVRL

SEQ ID NO: 94568 - protein, 110 aa, Ralstonia mannitolilytica
MFGYTIPYMLSFMKVDLGDWQVIVSLALFLAILFIMAYRTQTVFVNPILALAGYMLIDCTFKRGDKEIQAMVVTRQPLAVGDTCRMERMSHYLYVAVKDNANLDKKGTEK

SEQ ID NO: 94569 - protein, 312 aa, Ralstonia mannitolilytica; identical to SEQ ID NO: 94123

SEQ ID NO: 94570 - protein, 197 aa, Enterobacter sp. 44593; identical to SEQ ID NO: 93954

SEQ ID NO: 94571 - protein, 323 aa, Enterobacter sp. 44593
MFTNIENILKSKHISGEAFFVADIQGTIDIFKVNLEPDAEKDLTTSFSKSLINNIIEPNRGKVAVPLVSTLLERDKQVFEYDHLAINHLPIEFTKMNNVLNFGVNGNATQFDFATQSLTSVKAVIYHLCDGNGNSVVIYQHKYPVSLHKKTKKSFLSLNGRTLDKITHDSIDINDTIDFFFFQNKYYALNIKLLERMYGLESVIDNLANNSTPLIINLGIVNTQGMPVPLDIFKDMYKDRAFMRRLAMVSKGNLVKTGVSVPQIQQVMQKFPVFQRNIDLTGGLINLNTKDQKRYFIRLLNNEASFAALDNSPFLAVEKDSAA

SEQ ID NO: 94572 - protein, 199 aa, Enterobacter cloacae; identical to SEQ ID NO: 94264

SEQ ID NO: 94573 - protein, 319 aa, Enterobacter cloacae; identical to SEQ ID NO: 93941

SEQ ID NO: 94574 - protein, 203 aa, Listeria monocytogenes; identical to SEQ ID NO: 94338

SEQ ID NO: 94575 - protein, 313 aa, Listeria monocytogenes; identical to SEQ ID NO: 94339

SEQ ID NO: 94576 - protein, 169 aa, Vibrio parahaemolyticus
MRNSLKTIFFLSSFSPTLLALAIVRYFISGDDLLFYKLISVFVLGLVLFCLIFQLVMTQGEKISFKAKKVESTDYFLLVFLAAYTAPIVMRMVELNFRVISIILGLLMVTLWILPYIPSHPLMYLLKYRFYKVESDSGVVYTLISKRNIRDPKSIKQVIAISDSMLMEK

SEQ ID NO: 94577 - protein, 166 aa, Vibrio parahaemolyticus
MFHSSNVYKKIEGIGLTVDSKLTAILEGGRLRFHNFFMARQMFDLSEYYKEATNEDIAVFSSSDVVQVVEKEKLIEISDSWVRRKISLIQQSDILGTVPIHVMKAVASEFNIPFSTVNVNGNEVIQIPTEKPALKVLLRFLDEDYYKSPLSNTSFVTNSKRECNFS

SEQ ID NO: 94578 - protein, 195 aa, Vibrio parahaemolyticus; identical to SEQ ID NO: 94306

SEQ ID NO: 94579 - protein, 328 aa, Vibrio parahaemolyticus; identical to SEQ ID NO: 94307

SEQ ID NO: 94580 - protein, 194 aa, Xanthomonas citri subsp. citri; identical to SEQ ID NO: 93946

SEQ ID NO: 94581 - protein, 309 aa, Xanthomonas citri subsp. citri; identical to SEQ ID NO: 93687

SEQ ID NO: 94582 - protein, 194 aa, Xanthomonas citri subsp. citri UI6; identical to SEQ ID NO: 93946

SEQ ID NO: 94583 - protein, 309 aa, Xanthomonas citri subsp. citri UI6; identical to SEQ ID NO: 93687

SEQ ID NO: 94584 - protein, 194 aa, Xanthomonas citri subsp. citri; identical to SEQ ID NO: 93946

SEQ ID NO: 94585 - protein, 309 aa, Xanthomonas citri subsp. citri; identical to SEQ ID NO: 93687

SEQ ID NO: 94586 - protein, 194 aa, Xanthomonas citri subsp. citri; identical to SEQ ID NO: 93946

SEQ ID NO: 94587 - protein, 309 aa, Xanthomonas citri subsp. citri; identical to SEQ ID NO: 93687

SEQ ID NO: 94588 - protein, 194 aa, Xanthomonas citri subsp. citri; identical to SEQ ID NO: 93946

SEQ ID NO: 94589 - protein, 309 aa, Xanthomonas citri subsp. citri; identical to SEQ ID NO: 93687

SEQ ID NO: 94590 - protein, 194 aa, Xanthomonas citri subsp. citri; identical to SEQ ID NO: 93946

SEQ ID NO: 94591 - protein, 309 aa, Xanthomonas citri subsp. citri; identical to SEQ ID NO: 93687

SEQ ID NO: 94592 - protein, 194 aa, Xanthomonas citri subsp. citri; identical to SEQ ID NO: 93946

SEQ ID NO: 94593 - protein, 309 aa, Xanthomonas citri subsp. citri; identical to SEQ ID NO: 93687

SEQ ID NO: 94594 - protein, 194 aa, Xanthomonas citri subsp. citri; identical to SEQ ID NO: 93946

SEQ ID NO: 94595 - protein, 309 aa, Xanthomonas citri subsp. citri; identical to SEQ ID NO: 93687

SEQ ID NO: 94596 - protein, 194 aa, Xanthomonas citri subsp. citri; identical to SEQ ID NO: 93946

SEQ ID NO: 94597 - protein, 309 aa, Xanthomonas citri subsp. citri; identical to SEQ ID NO: 93687

SEQ ID NO: 94598 - protein, 194 aa, Xanthomonas citri subsp. citri; identical to SEQ ID NO: 93946

SEQ ID NO: 94599 - protein, 309 aa, Xanthomonas citri subsp. citri; identical to SEQ ID NO: 93687

SEQ ID NO: 94600 - protein, 194 aa, Xanthomonas citri subsp. citri; identical to SEQ ID NO: 93946

SEQ ID NO: 94601 - protein, 309 aa, Xanthomonas citri subsp. citri; identical to SEQ ID NO: 93687

SEQ ID NO: 94602 - protein, 194 aa, Xanthomonas citri subsp. citri; identical to SEQ ID NO: 93946

SEQ ID NO: 94603 - protein, 309 aa, Xanthomonas citri subsp. citri; identical to SEQ ID NO: 93687

SEQ ID NO: 94604 - protein, 194 aa, Xanthomonas citri subsp. citri; identical to SEQ ID NO: 93946

SEQ ID NO: 94605 - protein, 309 aa, Xanthomonas citri subsp. citri; identical to SEQ ID NO: 93687

SEQ ID NO: 94606 - protein, 194 aa, Xanthomonas citri subsp. citri; identical to SEQ ID NO: 93946

SEQ ID NO: 94607 - protein, 309 aa, Xanthomonas citri subsp. citri; identical to SEQ ID NO: 93687

SEQ ID NO: 94608 - protein, 197 aa, Klebsiella michiganensis
MDSRPYLKTVLYILSLWLLFLSLLIMSYDKVLIKNVWDYIFTENFTFSISSLKVRNIVFIVSLIFIFIGAIILIVLANSFGSGWSVACTVSDISNENHKHLEFLTTYIMPLVFTDVDSKRTVLNLGLMIFLIGAIYVKTNRFYSNPSLAILGFRIYKANVHDRGVKKCTVICRSVLKSTDNIKYIKIDNETYLAKIV

SEQ ID NO: 94609 - protein, 323 aa, Klebsiella michiganensis
MFTNIENISKSKRISGEAFFVTDIQGTIDIFKVNLEPDAEKDLTTSFSKSLINNIIEPNRGKVAVPLVSTLLERDKQVFEYDHLAINHLPIEFTKMNNVLNFGVNGNATQFDFATQSLTSVKAVIYHLCDGNGNSVVIYQHKYPVSLHKKTKKSFLSLNGRTLDKITHDSIDINDTIDFFFFQNKYYALNIKLLERMYGLESVIDNLANNSTPLIINLGIVNTQGMPVPLDIFKDMYKDRAFMRRLAMVSKGNLVKTGVSVPQIQQVMQKFPVFQRNIDLTGGLINLNTKDQKRYFIRLLNNEASFAALDNSPFLAVEKDSAA

SEQ ID NO: 94610 - protein, 162 aa, Acetobacter cibinongensis 4H-1
MLSLTAVCPVFISLAYIEFKNGKHTYCYFFLFLFFVVVFFAKCVIKKSKEKLEKIPITITKAKTTDKEVISFCISYALPIIFRANSVSNIETWLVASLILFVVLWTTDAMPANPVLGILGYHFYEVDSGSGVGYVLITKKRISNVQQINQVVQIGEYGILEL

SEQ ID NO: 94611 - protein, 286 aa, Acetobacter cibinongensis 4H-1
MNLFAITHASSDNILRLPLSADLQTNLETEFNRQEADFFNRIEELLPFCGAWKAEADEAFTIDQFSTLYDLPKAIKQPMSFPLYDKNLHNLSEIKAIFCGSSTKNNRILIQKFNKKNVIETKKYMFFFSGDTFVKSNDDAITIDDNICAAIEPDSSLVFRSYHSVRQVFDMSEYFVEATNDQMAEFANIQAFSIADQAKFLAIDNQFIRKKITEILKSGHLGTLNVQNICADAKKYKVEINIDDKGKILIPEDKQKLRVLLKFLNEDFFESIIKKDLYLSNSKRPI

SEQ ID NO: 94612 - protein, 176 aa, Gluconobacter thailandicus F149-1 = NBRC 100600
MFGRLAKFLLIASALAPVGLVYAWIVWRNQQHAIAIGIVAACAMLVLICVYLLRQARTSLERFPLNITSVEPADRENIAFMLLYLSPLFTSELGQININLLIPTLLIFTLLTATGYNYHFNPLLGLAGWHFYKVESSEGVTYVLITRKQLRNTSTINHVGQLTEYILIDLEDANAC

SEQ ID NO: 94613 - protein, 292 aa, Gluconobacter thailandicus F149-1 = NBRC 100600
MPVNLLAICRSAPALIVKRIKVTAAVQNQLEGIFIQQEQMFVGGVTDEVPFDGGWSPDPHEHLVAQVTDEAAAIFAAAQGNIVAMPEVDPANFEAENIRALGVLVQRPSGPRLLLQEFSARQMLERRFSLILDGNTFNRLVQPAFAIGASLAGFVEDDKIKFQKFSRIKLIFNLTSLYQEATDTEVEGFCGLECISVGDIGKFKNLADQKMRKLINAITKRGTLNNFTPAQIQVAAADENFQIAVADGKIIIPSMKAEAKALLHFLDNGLYRGPLGGEIFITNSKRALTPTP

SEQ ID NO: 94614 - protein, 184 aa, Bacteroides fragilis
MFANHIKLIFVLTAYSPIIFIVWAVEVYNNLTKGNQIGLINKPIEIFNRLNLIFIFIILLLACYLFMKAARGKLTINNIGVKSIKSADLNMNSLLLSYFLPCIELFKKDPIFIFGWFVVLIILIVINRGTYFYNPIIKLFGYRYYEVTTNSGVVYTMISKKKLVNTNEVKRYSQLTDYVILNQL

SEQ ID NO: 94615 - protein, 282 aa, Bacteroides fragilis
MRTQANSAVCNFFALLKDDTVRKIDLLQAITNNIKSCFIDNSTKLMDSETEEILFDGNFNIDGNEVLYVEFPLSDTLLEANTNSIGLNTLDISTDEIKSLFWIENNIYYFQNFDKRKLLQNKNVLFWNNSTYDKLSNDALIVENTVNAIYKNGKFYFKSYTNANKIISLIDFFEEASNETIEDFANQELLNVNVDWLKENSNSMIRKQITLIQKSNILATATVKKLKSSAKKFNLQIEIADGKLNIPNDKKQCKDVLCFLNEQFYIGLISGKKFRTNSKREA

SEQ ID NO: 94616 - protein, 170 aa, Klebsiella pneumoniae; identical to SEQ ID NO: 94132

SEQ ID NO: 94617 - protein, 294 aa, Klebsiella pneumoniae
MALFALMDKSIATRVVRVELDLGASTSVSTIFQQQRLHFQTHHNNHVAFYAGYEPRYDECFEIQNFADAALLIDAATRPTAMPVWDPSQISIDNIKALFVGVDAPGNPNIIALQTFNKKQILDTSKSFLATMIGRSTTFSKAVDVGFNLDDKLVAIIDNNTICFKSFFKLRSVFDMTSYFTAATDQDLDAFSQLPIFSIAQGFDIKNVADTVIRNKITLINQTGLLTPQNLALFKAEAVKVGFPLQTVVVGGVEKITMPSSKKEIKSLLDFIEEDIWVSGISGRRFKSSSKRPI

SEQ ID NO: 94618 - protein, 207 aa, Vibrio cholerae
MRINKLHLGARISLFIVSYLPLFFIMCFVQLYSYKNFLNWGGISYNSLSVFFKYFGAVTLLILISLFGIFGLVVFLNKIKSRCRTSGRVVKIVDIENKNSESISYLFTYIIPFVFQDLSTLTNVVPIAILLTVTALIYINSSMILINPTISIKYTLYQVTYVDIESGKTRSGMFLTKSKYLEEDDLLDIEDVGPKLFYAETHEEYKC

SEQ ID NO: 94619 - protein, 340 aa, Vibrio cholerae
MLKLEELLEYAENLKEDKKAKISLYFVTRHLKVGIDKNDKLTDKYDFKVIQAPIAQDIADFFKATLSNQITSHASKDDIVMKNYTVIDDDIDNKIYAYAMNNAISFSKVINEGIKNDKPKTLISLNEVKSDLWAYCIKVQQGTSFTYSFRKISGGKITTNDPQNTLQKVFALFDKTGGTLTAFDGNAINFDDKIDCIYIQDKFYVFHKKSFESIVGLETEFTEAAQKTLDTIKNFDLVEGLDIIEKAILHKPSLRKTLAHIAEKGNHTNLDKNEVKSMNDVLEMFQGEKFTINDAGKIVIEDEKQGRNFLKLLNDYYKQGMTTKKYYGSDAGNLVTPVKS

SEQ ID NO: 94620 - protein, 224 aa, Methanosarcina sp. WWM596
MSALKTKYKILMFLSSYTPLFLILLLKAISHILEKVQDYANLKIPEAVSENITFIEQVQIIAQHKTEFISLNIIPLVVIVTIIFIIIVPNLVLESILRETKCSIDFKDLYVQSVQKMNHIYMEYLVSYIIPFLSFDFSNFFDMISLLILLFTICIIYINSDLLYVNINFSIRGYNLFKVYTKKQNEYMVLSKEKQLYPDKILKVVYISGSSERIALDIEQEQTE

SEQ ID NO: 94621 - protein, 347 aa, Methanosarcina sp. WWM596
MTDYASYLQDLLRVAKQGHNVQMHLLKKTTSEKEEKKRQILNVEVDGEVLTSFKENLIEKCNELMSDSELTYIDFFSEDPEDNVISIINQEDMKSVGTLNPIISQIKSEDDSRSVTEFNDHTINKLQSYAISMAFSDDSGENKIEETCIYFRKYQVGSKIAKSKFFKVFEHKQGKFNKIEGDVFKYDDVIDAMYYERVDLDNPDQNGSKIMFVRNISNFEDMFSFEEFYKSNAKAAYTILKSCGNVEIEEALFKEITNDKRNLKRICKLNKGNFFKEIDFDRFFLIYNAASSLDYALNVESDGEKIKIKSKESFFEFIDICGNKLYGDLVDKKIYKGIAKELPKKSA

SEQ ID NO: 94622 - protein, 224 aa, Methanosarcina siciliae HI350
MSALKTKYKILMFLSSYTPLFLILLLKAISQILEKVQDYANLKIPEAVSENMTFVEQVQIVAQHKTEFISLNIIPLVVIVTIILVIIVPNLILESILRETKCSIDFKDLYVQSVQKMNHIYMEYLVSYIIPFLSFNYSNFFDMVSLLILLFTICIIYINSDLLYVNINFSIRGYNLFKVYTKKQNEYMVLSKEKQLYPDKILKVVYISGSSERIALDTEQEQTE

SEQ ID NO: 94623 - protein, 346 aa, Methanosarcina siciliae HI350
MIDYASYLQDLLRVAKQGHNVQMHLLKKTTSEKEEKKRQILNVEVDGEVLISFKENLIQKCNELISDNELTYIDFFSEEPEDNVISVINQEDMKSVGTLNPIISEIKNEDDSRSVTEFNNNTIQNLQSYAISMSSVDNSGENIEETCIYFRKYQVGSKIAKSKFFKVFEYKQGKFNKIEGDVFKYDDVIDAIYYERVDLDSPDQNGSKIMFVSNISNFEDMFSFEEFYKSNAKAAYTILQSCGNVEIEEALFKEITSDKRNLKKICKLNKGNFFTDIDFNRFFLIYNTASSLDYVLNVESDGEKIKIKNKESFFEFIDICGNKLYGDLVDDKIYRGIAKELPKKSA

SEQ ID NO: 94624 - protein, 196 aa, Lactobacillus melliventris
MKKLQKVMGICLKIFLFLSSYIPLFIMVFLNSMNQISIISIVKTWNLNPTLWIIFLVISFLSIVIFISWLCRMKKTFKGKSPISIKNLTLNDSAVLNFFVTFIVPIISLKPESWPSVISNLILLIIEGIFFISNNTLYFNILLIFCGYHIYSFVSDNNRKNIVITKCSLKDQTFNDVKGVEYGTTNIYYAEKIKHK

SEQ ID NO: 94625 - protein, 313 aa, Lactobacillus melliventris
MNLDEIKKLLNNDLIEVDMYMCHWSTDKKNNLKELKVINPTIKDKLKKQLKHIVEFNIDKFKDYDNTEYNIIGCDDDKIESTSVTRYQNQINLIFKALKGPFESDDDIKIDDFDFFVYKFSFKDNDDKHDFYAVRRTKKFKALKTGIWGMLEGGVYSSLDTENVLGTDSWVDFFIYKDDILILQHISFERILKLKNEFKEAAERVLSSELLHQKIKNFDQLKIDALNNQNYIKRLSKLEGTSRINLFLTKLDRTKDAIDKLGLDIEVDTIADKLVYNNNSQLGEFINLMQDAYYKTLIGEENGVDERKNLISK

SEQ ID NO: 94626 - protein, 218 aa, Bacillus sp. UMTAT18
MRNKLSNFMGGLVKVILFASSYIPLYVIMIFQLWESSKEKIKNTFHFSFFKITTWNSILELEDIKKIAFLTILTTVLVIILAYLLFTPTDPNTTKNLSIREVDSINVNYITSYFSVYIFPFITLNFTTFNGMATMIILVSLIGYVYIKNDLVYINPILHLLFRYNIYEVDIIENNETKKVTILSKKSRLKLKTSTNLKFNKLSTNIWIESHTLKKVKR

SEQ ID NO: 94627 - protein, 305 aa, Bacillus sp. UMTAT18
MEGIIRRLIEARETMERLEIHYITKSRNTALTNQYTKFEISVPMNVANEIKDLVFGNLVEKLTGLELREHDPVISEANTLEHLPLYEVDNFENIVSAPEEQVSELDFGNIWGYTIKVYFGQANHDIVFFKKFAYPRLLKKSIKLRLRNDIFDVIESEVVTIDDVIHSFSLDGTMFILNKAQFEKLFNFSSTYQQYVNQSVETLEELHVIENFEQFTNDCLESDTLTRRLVKTIKDERFENLQRNITNVPRVIDEFALNVHFVDDKIVYGDGSTITDIITLIKGACVYGALDDERYIASDTKSLRR

SEQ ID NO: 94628 - protein, 199 aa, Citrobacter amalonaticus; identical to SEQ ID NO: 93940

SEQ ID NO: 94629 - protein, 319 aa, Citrobacter amalonaticus; identical to SEQ ID NO: 93941

SEQ ID NO: 94630 - protein, 66 aa, Salmonella enterica
  subsp. enterica serovar Newport str. CDC 2010K-2159
MLFYISFSENYNFNPVLSLIGYKFYEAEDDTGVGFVLISKSVITDIKDIKFTVIQLTDYTFLHVKG

SEQ ID NO: 94631 - protein, 294 aa, Salmonella enterica; identical to SEQ ID NO: 93881
  subsp. enterica serovar Newport str. CDC 2010K-2159

SEQ ID NO: 94632 - protein, 198 aa, Salmonella enterica subsp. enterica serovar Hadar; identical to SEQ ID NO: 94112

SEQ ID NO: 94633 - protein, 325 aa, Salmonella enterica subsp. enterica serovar Hadar; identical to SEQ ID NO: 93783

SEQ ID NO: 94634 - protein, 198 aa, Salmonella enterica subsp. enterica serovar Hadar; identical to SEQ ID NO: 94112

SEQ ID NO: 94635 - protein, 325 aa, Salmonella enterica subsp. enterica serovar Hadar; identical to SEQ ID NO: 93783

SEQ ID NO: 94636 - protein, 198 aa, Salmonella enterica subsp. enterica serovar Hadar; identical to SEQ ID NO: 94112

SEQ ID NO: 94637 - protein, 325 aa, Salmonella enterica subsp. enterica serovar Hadar; identical to SEQ ID NO: 93783

SEQ ID NO: 94638 - protein, 209 aa, Pseudoalteromonas luteoviolacea S4054
MRQNRLKFGARFSLFIVSYLPLFFIMSFTQLYQYKQYLNWGGINLVAISNFFKYFGAVAVIGVVSIVGILGLLMLLKNVKRRCVQGGREAVVQEIENKNSESITYLFTYLIPFVFQDLSSFTNVVSIAVLLIVTFMIYVNSGMILINPTISMRYTLYQVTYKDHESGNSRKGMIITKCNFLEEGDKIEMEDVGHKLFYAQLIEDDNAAT

SEQ ID NO: 94639 - protein, 338 aa, Pseudoalteromonas luteoviolacea S4054
MLQLEDLLEYAEKLENDDNVKVSLMFVTRKLKPGMKASAKVLDKFDFILNKVALSEEISQYFKSVLINQIKTQASKDDIEVKPYTVIGDDLPQVYSYALNNALSFSKVITEQARADNTPTINCLNDIKNDLWAYCIKVKSGDKYTYSFRKVAKGKITTNTPDTLGKKLSAMFDKSEAELQEFDGSVISFDDKIDCLCIDEQFYVFHKSGFEQILGLDEEFTKTAQETVEAIKGFDLVEGLDLVEKELLQKSTIRKTLSSIKQKGNDKSLTKFEITAMNEILQKLEGESFEITEDGKIILSNSKDVKYFVKLLNDYYKQGMTTKKYYTSNAGSIIDPQG

SEQ ID NO: 94640 - protein, 206 aa, Methanosarcina mazei
MSKHTESIHILDKVGLYVTSLWLLFFLLIVLTIDVPITFSKNYIFIGFEELLKRNIIPIISFVFLIFGIIYCFYFDYKFKGTAPLQIEVQEIKNVNYEHILFLTTYIIPLLSFDISNIRYLLLLFLLLVIICAIYIQTNLFYANPTLALLGYHIYEMTGSRKKELETETYKNIIVITKTNISLNDEVQLLFLSDNIYFGRKYEHID

SEQ ID NO: 94641 - protein, 310 aa, Methanosarcina mazei
MNTLIENLNHILRGTISIVVYFKLKNGEVRLADINNNVLPRILTLYKNKISEEIINKENLELLKLSEMDERKNVIYKYDFDKDREPFLSMKQVVEDEEIKTFSISNDTLENIDGIIAKISNSNHGIFLYTKFYPVNLIKPGKSINLFPSDHRLEMFDGKLIQITGKFDILRYNNEYYIKKHEILEKFYQFNDVITERAKSYFEEIIKIKIIENEAKLFSYLENNPSRARKFIKVMASSLVIKKKIPKEQLISFVSNNPKLKDNIETSEDKTKFKLKTNNHCNFFIKLLDDDFLKSELTQEEYEALAKNNV

SEQ ID NO: 94642 - protein, 206 aa, Methanosarcina mazei; identical to SEQ ID NO: 94640

SEQ ID NO: 94643 - protein, 310 aa, Methanosarcina mazei; identical to SEQ ID NO: 94641

SEQ ID NO: 94644 - protein, 206 aa, Methanosarcina mazei; identical to SEQ ID NO: 94640

SEQ ID NO: 94645 - protein, 310 aa, Methanosarcina mazei; identical to SEQ ID NO: 94641

SEQ ID NO: 94646 - protein, 206 aa, Methanosarcina mazei; identical to SEQ ID NO: 94640

SEQ ID NO: 94647 - protein, 310 aa, Methanosarcina mazei; identical to SEQ ID NO: 94641

SEQ ID NO: 94648 - protein, 206 aa, Methanosarcina mazei; identical to SEQ ID NO: 94640

SEQ ID NO: 94649 - protein, 310 aa, Methanosarcina mazei; identical to SEQ ID NO: 94641

SEQ ID NO: 94650 - protein, 197 aa, Janthinobacterium sp. KBS0711
MQPRLYVAIFVYLGSYLPLSLILLVQEYDFDAPSLPFCKIWQNASSCYIPFSNSKAALSFVILCFSAFLVTLFILMTIKGSNKIKIIESKHIPADLINYVFPYVVSFMSLDYKGTGKMIGFLIFLIWMFLVTYKSGQLMLNPLLIIFGWRLYEIKYQYLGGTNIHSGRALSDDELQPNVTYSKNDIQDILTIKQRSV

SEQ ID NO: 94651 - protein, 310 aa, Janthinobacterium sp. KBS0711
MPTALETLLAFDVENSEIILWTFKKTLYTGVDAPVYTGHWVEISENLKDAIRDALVYEIVRITEVLEYGILAQNNEGSALSIEADETYAGLILEKIGDEVLNKKIKNLKEINNSAFYVLKVVAPDRTKFYAARKTDDSWHSRKSNGTISALFGDDSLDINYQRNFNISNHVDFFIVEDKLIISGKANFESVLSYKQAHLEDFTALTQQVDFSNIFSNVAPVVEYVGKNKIRLRRALAIHQKGHYKDPAFMGHLRINYTDYGLALQFDQNLKLVVTEINCRDVFTALLDHRLKSPFSQNVYDVQDTNNVVI

SEQ ID NO: 94652 - protein, 203 aa, Listeria monocytogenes; identical to SEQ ID NO: 94338

SEQ ID NO: 94653 - protein, 313 aa, Listeria monocytogenes; identical to SEQ ID NO: 94339

SEQ ID NO: 94654 - protein, 195 aa, Vibrio parahaemolyticus; identical to SEQ ID NO: 94306

SEQ ID NO: 94655 - protein, 328 aa, Vibrio parahaemolyticus; identical to SEQ ID NO: 94307

SEQ ID NO: 94656 - protein, 198 aa, Salmonella enterica subsp. enterica; identical to SEQ ID NO: 94112

SEQ ID NO: 94657 - protein, 325 aa, Salmonella enterica subsp. enterica; identical to SEQ ID NO: 93783

SEQ ID NO: 94658 - protein, 195 aa, Klebsiella pneumoniae
MKSKGTFNKIGLYILSLMLLFVFIIILSAKIPMCYGDSCEFIGFYKLAIDNVIPIIYFFFIFLACYFYKRLRSLIKINNADTVTITSCQSENYESLTFLTTYIVPFMGFSFDDIQKNIAYLLLVIIIGLIFIKTDKYYANPTLALFGYKLYRVNVSYTGSVEVKNVIAISTDILAVNDKVFYSFLDDYVFIARKK

SEQ ID NO: 94659 - protein, 319 aa, Klebsiella pneumoniae
MTPEILKSEVSDIFDNFTGIRIIFVVKIEDSYSLKLSKIEAEALPKIVEGFKRKIEEDMIENDDLTIPFLSNFDDRNNALFKFDYEEQPKEFGFIKSATTIPPNSQDFYDLRNKFTDVKGIIIQLRGNNKCLSLYKNKTNLTVFEQSRKLFNLIPDSDGYLKELPNQVFRLDYNYDLALLDNDFLIKNQKTLEVTMQFHQIIEAQATVALESLRSSSLIDDLSHLEKSAKEISFSRKLAKISKHSPVLGKIDVPVIIHYVSHHTYLSTVLIVSEDGRKLIIKTKESKKHFIKLLSDDYLESPLTKILYDSLAKDELKTN

SEQ ID NO: 94660 - protein, 195 aa, Vibrio parahaemolyticus; identical to SEQ ID NO: 94306

SEQ ID NO: 94661 - protein, 328 aa, Vibrio parahaemolyticus; identical to SEQ ID NO: 94307

SEQ ID NO: 94662 - protein, 171 aa, Candidatus Synechococcus spongiarum 15L
MLSGTAKVVLTATAIAPAGLTYAYAAFMADKTCLAIGLLCGSVICTVLCLFLLGYARKHLERMKFTAIKVEAADHENMAILLLYLSPLFTANFNALKWPILILTLLIFALVIGTRYGYHFNPLLGLQGWHFYKVATPEGVTYVLITKKRLRDACGRLVVGQLTEYIVLDLE

SEQ ID NO: 94663 - protein, 296 aa, Candidatus Synechococcus spongiarum 15L
MLMSMPRNFFAFCRGADQDSIRRIPLDADTQNALGVLFDDQEQQFLEGREEEVPFTGDWKPDDDQLLTITDEELAQPLVKTLHENVTVFDELDIKNFNKSGIKAIFTRSSKQENRILIQQFKSSQYLGPGKWNLIFDKNRFKQLSQPGFTLASNLAAVLDGSVFKFQSFQNLRIIFKVQHHFQEATHQEVRKFADHSSLCIDNHDEFMKLMTERIRKLIKSIIKSQILENYETDEIIQKARSVGIELKSKENKIIITNSKLEIKTVLSFLEDSVFRGSFSEETYETNSKRAVRREQ

SEQ ID NO: 94664 - protein, 170 aa, Nitrosomonas communis
MRNWLKTLLFVSSFSPALITTAYVRYDLYGWSMDVFQLIIFGLLGILLPILIIKLVEQQGETFHIQAKKIEPNDFMLLAFVGSYLLPLILNSAKISIDTIVVILVIIGLLLWLISSLPAHPLLRIFKFRFYKLESSAGMVYTLISKREIRDPKEIKFVKKLSETMLMEIK

SEQ ID NO: 94665 - protein, 163 aa, Nitrosomonas communis
MFHSLNVYRKIEGIGLTIDNKLTAIIRNGALKFHSFHLLRQIFDVSEYYKEATDVDIQQFANMACVSVTNTANLVSISDTWIRRKLWLISQSQILQKVPVYDIKAVAAEFNISLDTKMENGSEKIEIPDTKKELKTLLRFLDEDYYKSPLLQNRYLTNSKRLI

SEQ ID NO: 94666 - protein, 194 aa, Xanthomonas perforans; identical to SEQ ID NO: 93798

SEQ ID NO: 94667 - protein, 309 aa, Xanthomonas perforans; identical to SEQ ID NO: 93799

SEQ ID NO: 94668 - protein, 194 aa, Xanthomonas perforans; identical to SEQ ID NO: 93798

SEQ ID NO: 94669 - protein, 309 aa, Xanthomonas perforans; identical to SEQ ID NO: 93799

SEQ ID NO: 94670 - protein, 194 aa, Xanthomonas perforans; identical to SEQ ID NO: 93798

SEQ ID NO: 94671 - protein, 309 aa, Xanthomonas perforans; identical to SEQ ID NO: 93799

SEQ ID NO: 94672 - protein, 194 aa, Xanthomonas perforans; identical to SEQ ID NO: 93798

SEQ ID NO: 94673 - protein, 309 aa, Xanthomonas perforans; identical to SEQ ID NO: 93799

SEQ ID NO: 94674 - protein, 194 aa, Xanthomonas perforans; identical to SEQ ID NO: 93798

SEQ ID NO: 94675 - protein, 309 aa, Xanthomonas perforans; identical to SEQ ID NO: 93799

SEQ ID NO: 94676 - protein, 194 aa, Xanthomonas perforans; identical to SEQ ID NO: 93798

SEQ ID NO: 94677 - protein, 309 aa, Xanthomonas perforans; identical to SEQ ID NO: 93799

SEQ ID NO: 94678 - protein, 194 aa, Xanthomonas perforans; identical to SEQ ID NO: 93798

SEQ ID NO: 94679 - protein, 309 aa, Xanthomonas perforans; identical to SEQ ID NO: 93799

SEQ ID NO: 94680 - protein, 194 aa, Xanthomonas perforans; identical to SEQ ID NO: 93798

SEQ ID NO: 94681 - protein, 309 aa, Xanthomonas perforans; identical to SEQ ID NO: 93799

SEQ ID NO: 94682 - protein, 194 aa, Xanthomonas perforans; identical to SEQ ID NO: 93798

SEQ ID NO: 94683 - protein, 309 aa, Xanthomonas perforans; identical to SEQ ID NO: 93799

SEQ ID NO: 94684 - protein, 194 aa, Xanthomonas perforans; identical to SEQ ID NO: 93798

SEQ ID NO: 94685 - protein, 309 aa, Xanthomonas perforans; identical to SEQ ID NO: 93799

SEQ ID NO: 94686 - protein, 194 aa, Xanthomonas perforans; identical to SEQ ID NO: 93798

SEQ ID NO: 94687 - protein, 309 aa, Xanthomonas perforans; identical to SEQ ID NO: 93799

SEQ ID NO: 94688 - protein, 194 aa, Xanthomonas perforans; identical to SEQ ID NO: 93798

SEQ ID NO: 94689 - protein, 309 aa, Xanthomonas perforans; identical to SEQ ID NO: 93799

SEQ ID NO: 94690 - protein, 194 aa, Xanthomonas perforans; identical to SEQ ID NO: 93798

SEQ ID NO: 94691 - protein, 309 aa, Xanthomonas perforans; identical to SEQ ID NO: 93799

SEQ ID NO: 94692 - protein, 194 aa, Xanthomonas perforans; identical to SEQ ID NO: 93798

SEQ ID NO: 94693 - protein, 309 aa, Xanthomonas perforans; identical to SEQ ID NO: 93799

SEQ ID NO: 94694 - protein, 194 aa, Xanthomonas perforans; identical to SEQ ID NO: 93798

SEQ ID NO: 94695 - protein, 309 aa, Xanthomonas perforans; identical to SEQ ID NO: 93799

SEQ ID NO: 94696 - protein, 194 aa, Xanthomonas perforans; identical to SEQ ID NO: 93798

SEQ ID NO: 94697 - protein, 309 aa, Xanthomonas perforans; identical to SEQ ID NO: 93799

SEQ ID NO: 94698 - protein, 194 aa, Xanthomonas perforans; identical to SEQ ID NO: 93798

SEQ ID NO: 94699 - protein, 309 aa, Xanthomonas perforans; identical to SEQ ID NO: 93799

SEQ ID NO: 94700 - protein, 194 aa, Xanthomonas perforans; identical to SEQ ID NO: 93798

SEQ ID NO: 94701 - protein, 309 aa, Xanthomonas perforans; identical to SEQ ID NO: 93799

SEQ ID NO: 94702 - protein, 194 aa, Xanthomonas perforans; identical to SEQ ID NO: 93798

SEQ ID NO: 94703 - protein, 309 aa, Xanthomonas perforans; identical to SEQ ID NO: 93799

SEQ ID NO: 94704 - protein, 194 aa, Xanthomonas perforans; identical to SEQ ID NO: 93798

SEQ ID NO: 94705 - protein, 309 aa, Xanthomonas perforans; identical to SEQ ID NO: 93799

SEQ ID NO: 94706 - protein, 194 aa, Xanthomonas perforans; identical to SEQ ID NO: 93798

SEQ ID NO: 94707 - protein, 309 aa, Xanthomonas perforans; identical to SEQ ID NO: 93799

SEQ ID NO: 94708 - protein, 194 aa, Xanthomonas perforans; identical to SEQ ID NO: 93798

SEQ ID NO: 94709 - protein, 309 aa, Xanthomonas perforans; identical to SEQ ID NO: 93799

SEQ ID NO: 94710 - protein, 194 aa, Xanthomonas perforans; identical to SEQ ID NO: 93798

SEQ ID NO: 94711 - protein, 309 aa, Xanthomonas perforans; identical to SEQ ID NO: 93799

SEQ ID NO: 94712 - protein, 194 aa, Xanthomonas perforans; identical to SEQ ID NO: 93798

SEQ ID NO: 94713 - protein, 309 aa, Xanthomonas perforans; identical to SEQ ID NO: 93799

SEQ ID NO: 94714 - protein, 194 aa, Xanthomonas perforans; identical to SEQ ID NO: 93798

SEQ ID NO: 94715 - protein, 309 aa, Xanthomonas perforans; identical to SEQ ID NO: 93799

SEQ ID NO: 94716 - protein, 194 aa, Xanthomonas perforans; identical to SEQ ID NO: 93798

SEQ ID NO: 94717 - protein, 309 aa, Xanthomonas perforans; identical to SEQ ID NO: 93799

SEQ ID NO: 94718 - protein, 194 aa, Xanthomonas perforans; identical to SEQ ID NO: 93798

SEQ ID NO: 94719 - protein, 309 aa, Xanthomonas perforans; identical to SEQ ID NO: 93799

SEQ ID NO: 94720 - protein, 194 aa, Xanthomonas perforans; identical to SEQ ID NO: 93798

SEQ ID NO: 94721 - protein, 309 aa, Xanthomonas perforans; identical to SEQ ID NO: 93799

SEQ ID NO: 94722 - protein, 194 aa, Xanthomonas perforans; identical to SEQ ID NO: 93798

SEQ ID NO: 94723 - protein, 309 aa, Xanthomonas perforans; identical to SEQ ID NO: 93799

SEQ ID NO: 94724 - protein, 194 aa, Xanthomonas perforans; identical to SEQ ID NO: 93798

SEQ ID NO: 94725 - protein, 309 aa, Xanthomonas perforans; identical to SEQ ID NO: 93799

SEQ ID NO: 94726 - protein, 194 aa, Xanthomonas perforans; identical to SEQ ID NO: 93798

SEQ ID NO: 94727 - protein, 309 aa, Xanthomonas perforans; identical to SEQ ID NO: 93799

SEQ ID NO: 94728 - protein, 172 aa, Enterobacter aerogenes
MLNGFARYALTASSVAPVCLTLAFLAYINDNYKILVSSILLAVISVVFCVFIIKQAQKYNPVTLKNLESASPADKEITNYFLTYLFPLISGPTTFMDWRLALFFYLSLFFYIKHSSSYSFNPILSIIFGFKFYEAEDDTGVSFVLLSTKPLTNAKIKGLRVKKLTEHTYMIV

SEQ ID NO: 94729 - protein, 297 aa, Enterobacter aerogenes; identical to SEQ ID NO: 94045

SEQ ID NO: 94730 - protein, 197 aa, Enterobacter aerogenes
MKKRTGLKYALYILSLWLLFVSLFIMSYDKNLFVSISSYLDSKDTEILISSITPKNIVFISSFAMIVAGVLIFLYLLFSFNSGWSVACTVSDVRNESHEHLEFLTTYVMPLVFTDVNSKRTMLNLLIMIVAIGMIYVKTNRFYSNPSLALLGFRIFKANINDRGTKEFVIICHGEIDSNSRIKYIKLDNNTCLAKIT

SEQ ID NO: 94731 - protein, 325 aa, Enterobacter aerogenes
MFTAIDNILNSAQLSGEAYFVAELQGQLDIFRVALEPGAEQKLTQSFSQSLKRDVVDPNTGQNALPLVSSLLSRDKQVHEYDHQVINHLPPALAKMADVLSFGVNNTPTDFDFAQQNLSTVKGIVYYLCDGQGNGVVVYQHKYPIALHKKTKLSYFSANGRTLDEVTHDSIDINGNVDFFYFNNKYYALNINLLERAYGLEQVINNLAANATPHIIALNILDVSNHPNPADIFNDMHRNRNFMRRLATTANSPLIQNGTINIATIQTLIQNFPILGRNIIINQAGLIELSSQKQKLYFIRLLNNEASFTALNREPFLAVGKDSAA

SEQ ID NO: 94732 - protein, 197 aa, Enterobacter aerogenes; identical to SEQ ID NO: 94730

SEQ ID NO: 94733 - protein, 325 aa, Enterobacter aerogenes
MFTAIDNILNSAQLSGEAYFVAELQGQLDIFRVALEPGAEQKLTQSFSQSLKRDVVDPNTGQIALPLVSSLLSRDKQVHEYDHQVINHLPPALAKMADVLSFGVNNTPTDFDFAQQNLSTVKGIVYYLCDGQGNGVVVYQHKYPIALHKKTKLSYFSANGRTLDEVTHDSIDINGNVDFFYFNNKYYALNINLLERAYGLEQVINNLAANATPHIIALNILDVSNHPNPADIFNDMHRNRNFMRRLATTANSPLIQNGTINIATIQTLIQNFPILGRNIIINQAGLIELSSQKQKLYFIRLLNNEASFTALNREPFLAVGKDSAA

SEQ ID NO: 94734 - protein, 197 aa, Enterobacter cloacae
MDSRPYLKTVLYILSLWLLFLSLLIMSYDKVLIKNVWNYIFTENFTFPISSLKVRNIVFIVSLIFIFIGAIILIILANSFGSGWSVACTVSDISNENHEHLEFLTTYIMPLVFTDVDSKRTVLNLGLMIFVIGAIYVKTNRFYSNPSLAILGFRIYKANVHDRGVKKCTVICRSVLKSTDNIKYIKIDDETYLAKIV

SEQ ID NO: 94735 - protein, 323 aa, Enterobacter cloacae
MFTNIENILKSKRISGEAFFVADVQGTIDIFKVNLEPDAEKDLTTSFSKSLINNIIEPNRGKVAVPLVSTLLERDKQVFEYDHLAINHLPIEFTKMNNVLNFGVNGNATQFDFATQSLTSVKAVIYHLCDGNGNSVVIYQHKYPVSLHKKTKKSFLSLNGRTLDKITHDSIDINDTIDFFFFQNKYYALNIKLLERMYGLESVIDNLANNSTPLIINLGIVNTQGMPVPLDIFKDMYKDRAFMRRLAMVSKGNLVKTGVSVPQIQQVMQKFPVFQRNIDLTGGLINLNTKDQKRYFIRLLNNEASFAALDNSPFLAVEKDSAA

SEQ ID NO: 94736 - protein, 171 aa, Escherichia coli; identical to SEQ ID NO: 93814

SEQ ID NO: 94737 - protein, 297 aa, Escherichia coli; identical to SEQ ID NO: 93815

SEQ ID NO: 94738 - protein, 173 aa, Escherichia coli
MMNKLARLLLTASSIAPVCATLFFIGYVKDTVWLMQYSLCVGIASWLLAIGLIQYAEKQLEPLTKNISSVSPANKEVTNYFLSYLFPLLGTDSIAENKAYALFFYLSLLFYISFSENYNFNPVLSLIGYKFYEAEDDTGVGFVLISKSVITDIKDIKFTVIQLTDYTFLHVKG

SEQ ID NO: 94739 - protein, 294 aa, Escherichia coli; identical to SEQ ID NO: 93791

SEQ ID NO: 94740 - protein, 171 aa, Escherichia coli
MLNKLAKYLLTASSVAPVFFTLAFLSCISKHYKFMIAYLSLCAIILLLCILIVKYAIKYNSVTSKKLTTASPADKEITNYFLTYLFPLISGPDAFMDIRIASFFAVSLFFYISFSGSYSFNPLLSFWGYKYYEAEDDTGVSFVILSKKPLLKASGNRVNLIKLTDYTYIAI

SEQ ID NO: 94741 - protein, 297 aa, Escherichia coli; identical to SEQ ID NO: 93815

SEQ ID NO: 94742 - protein, 182 aa, Polyangium brachysporum
MKLRFWPSLLIFASSYFPLALVVIIKDLDPGTFWPQHPKMALAIIVSALLCMLALYVTVRSIPPGLPVLVTRVSNKSGELVAYTLPYMISFYRFDLGDWRTLLCLLLFLGMMFALSYRTRNILVNPVLGLVGYGLYDVQFKEGARDRQGLLLSRQEFRVGDRCHVTRLSNFLYFVKKVEVDE

SEQ ID NO: 94743 - protein, 311 aa, Polyangium brachysporum
MKAEPLPAATMALHDTDWSSATASLWIVKRRLVERRARYDVLGVDIDEKLQERLRSELRELVARPVAREPYEFVTADQDETVLTLEWAETDFAAIEARIAKGLDAPRARSVDDLLNSWCYVVRLEHRDQVVYGVKKTAAQSSTRRVRGLRNLLWEGHMLVDLDERSVFTLASGFDFVAYDGTLLIYDKRQFESALNFRQGMEKVRDAVLQEFVDAGIFVDVAPLREAVGTNLPRLRRMSALDRSGYYRDRRFMERLLALNEQEQWGLQVHDGRIVVTEDNVDTVLLLLNNGRLRSPVNNETFDALVKKKIE

SEQ ID NO: 94744 - protein, 169 aa, Aeromonas hydrophila NJ-35; identical to SEQ ID NO: 94018

SEQ ID NO: 94745 - protein, 295 aa, Aeromonas hydrophila NJ-35; identical to SEQ ID NO: 94019

SEQ ID NO: 94746 - protein, 195 aa, Xanthomonas translucens pv. undulosa
MNINRTVEKFELYILSLWLLFLLIIVVTIDIPICAQPDCSFIGLKALVVRNVVPAVALALVGLGVLYYLRFNYKIAGSKSIPVEVSSIEDINYEHLTFLTTYIIPLICFNLTSERYLIALGLLLVVIGIIYVRTDKFYANPTLAVLGFRLYSAKVTRRTGEEVKVTLITRDQIKDGDKIRFLELDSRVYYAKGSA

SEQ ID NO: 94747 - protein, 322 aa, Xanthomonas translucens pv. undulosa
MSLDLLRAQISEVISDDACSAEFYFFLEDAGQISIKRADIDQSASDELTRNFIETISSMILLDDDLSLLNISGADDRSNAIYRYDLPEVPVQIQHLATILQRDDFEVFSFEDDDLANLKGILVILGHGQQQLALYKHQYPVALLKRDSAFSLVRIRNQNRLVKLEDDILRINSKFDFMRIGNEYFIVDIKTLERFFGFHDAVRNIATQGIANIDHAQLVIDTGVLSARLDDISFSRKLVRAARASPVLGVIPNDQVIAFVGTHPALRGKFRLSDDGSKLKLDTKVSQDLFLKLLNDDFLQSELTKRYYASLAKDNLEAAAAL

SEQ ID NO: 94748 - protein, 171 aa, Klebsiella pneumoniae
MLNKLAKYLLTASSVAPVFFTLAFLSYISKHYKFMIAYLSLGVTILLLCVLIVKYAINHNSVTNKKLTNASPADKEITNYFLTYLFPLISGPEAFMDVRIASFFALSLFFYISFSGSYSFNPLLSFWGYKYYEAEDDTGVSFVVLSKKPLLKASGNRINLIKLTDYTYIAI

SEQ ID NO: 94749 - protein, 297 aa, Klebsiella pneumoniae; identical to SEQ ID NO: 93759

SEQ ID NO: 94750 - protein, 171 aa, Klebsiella pneumoniae; identical to SEQ ID NO: 94748

SEQ ID NO: 94751 - protein, 297 aa, Klebsiella pneumoniae; identical to SEQ ID NO: 93759

SEQ ID NO: 94752 - protein, 172 aa, Enterobacter sp. GN02825; identical to SEQ ID NO: 94158

SEQ ID NO: 94753 - protein, 294 aa, Enterobacter sp. GN02825; identical to SEQ ID NO: 94159

SEQ ID NO: 94754 - protein, 200 aa, Enterobacter cloacae; identical to SEQ ID NO: 94218

SEQ ID NO: 94755 - protein, 313 aa, Enterobacter cloacae
MDKKDLDDNLSYYINNKDDVSVIIYAILKSSPDAYRMDIEASAQDSLKELFLDSIKNNIIDDGDLSVLPLSSADERNNVIYQYDIGWPDELTSMQNMLGQPGEAVFDFKTQQIEDIRVLLVCIGNADQQIVLYKTMAPVNIFSRTGFFLKKSATRLEEIKDDFFRVSDNFQIIKVENDLYVVDLKLIEKMFGFHEVIKKEATLGMTAIEGMNIITDIEVIKELIDDIKYARKLTRIAKSSPVILAKIENEKIIEFCKTYPVLINRIRFNEDGTKIALDTKVSKDLFIKILMDDFLTSQLTQFYYESLAKDAVK

SEQ ID NO: 94756 - protein, 195 aa, Enterobacter cloacae; identical to SEQ ID NO: 93866

SEQ ID NO: 94757 - protein, 315 aa, Enterobacter cloacae; identical to SEQ ID NO: 93867

SEQ ID NO: 94758 - protein, 203 aa, Listeria monocytogenes; identical to SEQ ID NO: 94338

SEQ ID NO: 94759 - protein, 313 aa, Listeria monocytogenes; identical to SEQ ID NO: 94339

SEQ ID NO: 94760 - protein, 90 aa, Salmonella enterica subsp. enterica serovar Typhimurium; identical to SEQ ID NO: 94110

SEQ ID NO: 94761 - protein, 325 aa, Salmonella enterica subsp. enterica serovar Typhimurium; identical to SEQ ID NO: 93783

SEQ ID NO: 94762 - protein, 197 aa, Salmonella enterica subsp. enterica serovar Typhimurium
MKKRTGLKYALYILSLWLLFVSLFIMSYDKNLFVSISTYLDSKDTGTLLSSITPKNIVFISSFAMIVAGVFFLYLLLSFNSGWSVACTVSDVRNESHEHLEFLTTYVMPLVFTDVNSKRTMLNLLIMIVAIGMIYVKTNRFYSNPSLALLGFRIFKANINDRGTKEFVIICHGEIDNNSRIKYIKLDNNTCLAKITQ

SEQ ID NO: 94763 - protein, 325 aa, Salmonella enterica subsp. enterica serovar Typhimurium; identical to SEQ ID NO: 93783

SEQ ID NO: 94764 - protein, 176 aa, Pasteurella multocida subsp. multocida
MLSWLAKYLFSASSAAPVCITFAVMAWFKGELALTWMMISFALIITFLFLYVFIHIKNELSQTTLSINSVSSANKEITNYFLAYLFPIIGADSIISDWRIAIFFYLCFFFYLSFSSSYHFNPLLFLMGYKIYEATDPTGRGIVILSKEEIRKGNLKNMVVKEITPYMYLIEKINYE

SEQ ID NO: 94765 - protein, 295 aa, Pasteurella multocida subsp. multocida
MNSYFAIIKQGFSPRIVSLAIDINAQNVLNSEFKRCKDDFNNVEPEEYYTGYQSEDNSELFYIDKFNLNINVFDALENPTNQKVFDINEIGIENIIAIFTSGNSHEECLVQYYNSNNFIKMSKTVFMTDKKKEMTAGYINGFSIANKLVAVLRKKNDNIRIIFRSFDLARRIFTTLDDYFKEATDEELKSFISSHFDADPNFNILEIANKNTRNKVTQLNKHKVLDNKTADEIKQMASKFEFELNINPQSKKVLIPNNIRDINELLSGFASLIYQSPITGERMKANAARPYPKKK

SEQ ID NO: 94766 - protein, 176 aa, Pasteurella multocida subsp. multocida; identical to SEQ ID NO: 94764

SEQ ID NO: 94767 - protein, 295 aa, Pasteurella multocida subsp. multocida; identical to SEQ ID NO: 94765

SEQ ID NO: 94768 - protein, 176 aa, Pasteurella multocida subsp. multocida; identical to SEQ ID NO: 94764

SEQ ID NO: 94769 - protein, 295 aa, Pasteurella multocida subsp. multocida; identical to SEQ ID NO: 94765

SEQ ID NO: 94770 - protein, 176 aa, Pasteurella multocida subsp. multocida; identical to SEQ ID NO: 94764

SEQ ID NO: 94771 - protein, 295 aa, Pasteurella multocida subsp. multocida; identical to SEQ ID NO: 94765

SEQ ID NO: 94772 - protein, 176 aa, Pasteurella multocida subsp. multocida; identical to SEQ ID NO: 94764

SEQ ID NO: 94773 - protein, 295 aa, Pasteurella multocida subsp. multocida; identical to SEQ ID NO: 94765

SEQ ID NO: 94774 - protein, 176 aa, Pasteurella multocida subsp. multocida; identical to SEQ ID NO: 94764

SEQ ID NO: 94775 - protein, 295 aa, Pasteurella multocida subsp. multocida; identical to SEQ ID NO: 94765

SEQ ID NO: 94776 - protein, 176 aa, Pasteurella multocida subsp. multocida; identical to SEQ ID NO: 94764

SEQ ID NO: 94777 - protein, 295 aa, Pasteurella multocida subsp. multocida; identical to SEQ ID NO: 94765

SEQ ID NO: 94778 - protein, 194 aa, Xanthomonas citri pv. citri; identical to SEQ ID NO: 93946

SEQ ID NO: 94779 - protein, 309 aa, Xanthomonas citri pv. citri; identical to SEQ ID NO: 93687

SEQ ID NO: 94780 - protein, 172 aa, Enterobacter cloacae; identical to SEQ ID NO: 94214

SEQ ID NO: 94781 - protein, 295 aa, Enterobacter cloacae
MPLFAIMDNQSAIKIVRIKLDRAASTMINETFNQQRQYFEAHHDSVIPFYAGYNPSYNESFELENFHDSNLLMDAVRRNTAIPEWKPEEINIDHIKGLFVGVGEPNAENCIALQTFNKKQILDTSKSFVMSLVGAANTFSKAEKVGFNIDDKLVAIIKNDKIHFRSFFKLRSIFDMTVYFQEATDQDLALFSSNAAFSIPEGLDLSVIADTPIRNKITLINKSGILDAELLPVLKSAAEKIGFPLKINNVEGQERIEMPQTKREIKALLDFLDEDIFTSEISQKVFKSNSKRPYA

SEQ ID NO: 94782 - protein, 190 aa, Enterobacter aerogenes; identical to SEQ ID NO: 94210

SEQ ID NO: 94783 - protein, 297 aa, Enterobacter aerogenes; identical to SEQ ID NO: 94045

SEQ ID NO: 94784 - protein, 197 aa, Serratia marcescens; identical to SEQ ID NO: 94106

SEQ ID NO: 94785 - protein, 323 aa, Serratia marcescens; identical to SEQ ID NO: 94107

SEQ ID NO: 94786 - protein, 204 aa, Escherichia coli; identical to SEQ ID NO: 93768

SEQ ID NO: 94787 - protein, 340 aa, Escherichia coli; identical to SEQ ID NO: 94081

SEQ ID NO: 94788 - protein, 173 aa, Klebsiella pneumoniae; identical to SEQ ID NO: 93860

SEQ ID NO: 94789 - protein, 289 aa, Klebsiella pneumoniae
MSLFAMMNKNSAVKVYRIDTDRQTDIKIKKIFDDQLSLFESHHNTELVFEAGYTPSYNECSYIDNFDEGKILLDAVQRSTAMPLWTKNVGLNDITAFFMAPAYPQVKDKIAIQTFSKKQILNESRYLWLSKNSFTMSDLLGFNLDDKLVAILEGDKIKFRNFNNLRSIFDMSPYFAEATKQEISDFVNQPVFNIPVGFDLPALADNVIRKKVTLINKSKILVNHTVTEIKNAALTLNFPIKTTGSGSSEKIEMPTNKKEIKELLNFLDEDYFNSEITKQRFRSNSKRKA

SEQ ID NO: 94790 - protein, 195 aa, Escherichia coli; identical to SEQ ID NO: 93788

SEQ ID NO: 94791 - protein, 319 aa, Escherichia coli; identical to SEQ ID NO: 93789

SEQ ID NO: 94792 - protein, 197 aa, Klebsiella pneumoniae; identical to SEQ ID NO: 93954

SEQ ID NO: 94793 - protein, 323 aa, Klebsiella pneumoniae; identical to SEQ ID NO: 94023

SEQ ID NO: 94794 - protein, 190 aa, Klebsiella pneumoniae; identical to SEQ ID NO: 93770

SEQ ID NO: 94795 - protein, 288 aa, Klebsiella pneumoniae
MELFAITDSEIPTRIIKIDIDAPAQTVVENLFRTQRSEFINEDIEEIDFCASYNVQDGEIFSINPFDDEIGIINAIERPDAVPVWDPDDVSVHYFKALFTGEPASNGNPTQVWLQCFDRRQIINNEKSFFQVVTQPGNRFSVSTRPGFSLSDRLTAILVGDKLLFKSFFMLRRFFNMEEYFNEATREDLDNFIGNDIFHVENAEDFMTFADSAIKKKVSLIISSGILNDQPIENLIECAQKIGYQLGITNVNGDNKITMPNSKREVKQLLYFLDQGYFNSIITNELML

SEQ ID NO: 94796 - protein, 172 aa, Klebsiella pneumoniae
MNKIARFLLTASSIAPVGITLIFIGYMKNKPWLIWWSLGICLASFISVIFFLHYANKNLPSLYKNVETISPANKEVTNYFLSYLFPLLGTDSIADKWQYAVFFYISLIVYICFSENYNFNPLISALGFKFYEAEDDTGVGFVLISKEVITNLKNRDFEVIQLTDYTFMHVTR

SEQ ID NO: 94797 - protein, 284 aa, Klebsiella pneumoniae
MMNKNSAVKVYRIDTDRQTDIKIKKIFDDQLSLFESHHNTELVFEAGYTPSYNECSYIDNFDEGKILLDAVQRSTAMPLWTKNVGLNDITAFFMAPAYPQVKDKIAIQTFSKKQILNESRYLWLSKNSFTMSDLLGFNLDDKLVAILEGDKIKFRNFNNLRSIFDMSSYFAEATKQEISDFVNQPVFNIPVGFDLPALADNVIRKKVTLINKSKILVNHTVTEIKNAALTLNFPIKTTGSGSSEKIEMPTNKKEIKELLNFLDEDYFNSEITKQRFRSNSKRKA

SEQ ID NO: 94798 - protein, 172 aa, Klebsiella pneumoniae; identical to SEQ ID NO: 94796

SEQ ID NO: 94799 - protein, 284 aa, Klebsiella pneumoniae; identical to SEQ ID NO: 94797

SEQ ID NO: 94800 - protein, 172 aa, Klebsiella pneumoniae; identical to SEQ ID NO: 94796

SEQ ID NO: 94801 - protein, 284 aa, Klebsiella pneumoniae; identical to SEQ ID NO: 94797

SEQ ID NO: 94802 - protein, 170 aa, Klebsiella pneumoniae; identical to SEQ ID NO: 94132

SEQ ID NO: 94803 - protein, 294 aa, Klebsiella pneumoniae; identical to SEQ ID NO: 94133

SEQ ID NO: 94804 - protein, 197 aa, Serratia marcescens; identical to SEQ ID NO: 94106

SEQ ID NO: 94805 - protein, 323 aa, Serratia marcescens; identical to SEQ ID NO: 94107

SEQ ID NO: 94806 - protein, 90 aa, Salmonella enterica subsp. enterica serovar Typhimurium; identical to SEQ ID NO: 94110

SEQ ID NO: 94807 - protein, 325 aa, Salmonella enterica subsp. enterica serovar Typhimurium; identical to SEQ ID NO: 93783

SEQ ID NO: 94808 - protein, 198 aa, Salmonella enterica subsp. enterica serovar Typhimurium; identical to SEQ ID NO: 94112

SEQ ID NO: 94809 - protein, 325 aa, Salmonella enterica subsp. enterica serovar Typhimurium; identical to SEQ ID NO: 93783

SEQ ID NO: 94810 - protein, 90 aa, Salmonella enterica subsp. enterica serovar Typhimurium; identical to SEQ ID NO: 94110

SEQ ID NO: 94811 - protein, 325 aa, Salmonella enterica subsp. enterica serovar Typhimurium; identical to SEQ ID NO: 93783

SEQ ID NO: 94812 - protein, 200 aa, Citrobacter sp. MGH106
MKNDSKETKEYVRRKIDLYILSLAILFCFFIFITLKFPVCFGAKCEFIGWSLLLKNNVVPLVCLGLLIYCWIAYRRFKYDTNKTVELPLKIIKIEKINYEHLTFLATYIIPLITFDFEKERYVIVLAVLLIIMGVIYIKTDLFYANPSLALLGFNIYKLDVSITGGINKTGLILITRRQLKENDMVSYIVLDERVYYSGD

SEQ ID NO: 94813 - protein, 318 aa, Citrobacter sp. MGH106; identical to SEQ ID NO: 94219

SEQ ID NO: 94814 - protein, 171 aa, Citrobacter sp. BIDMC107
MLSFIAKYILTASAVAPVCITLSFVAWLNGSKVYCFFSLSLAILSFLLCWLTLHIAKKRVSETHVNLTSLTPANKEITNYFLAYLFPLITDDKLIENIWLAVFFYISLFVYIGFSGSYSFNPILSFLGYKFYEAEDDTNVSFVLISKKALQKGNVKGLKVVQLTDHTFIKV

SEQ ID NO: 94815 - protein, 290 aa, Citrobacter sp. BIDMC107
MELFALTEDDITPDVVKICLDKKTSDTVNQIFEKMIAAFYETSPDPMDYSADYKLDKNEHFIIPGFKQHIPLGEALISPKAITALDINDIGLDKIKALFTGSTDGQRIYIQKFDKGQVITATNSFFFFDNTKTFSAPEHNGLTIGPKLTAIIDSNILLFRNFNNLRRIFNMDEYYRSATDSELDAFQESDVFHCENGFKLSDFDDTVIRRKVTLLNMSGVLKEHTIATLQEAASVLNHPLDIMRFEEKDKIKLPNNKRDIKLLLSFLDSDIYISAINGVKYRSNSKTRII

SEQ ID NO: 94816 - protein, 198 aa, Salmonella enterica subsp. enterica serovar Typhimurium; identical to SEQ ID NO: 94112

SEQ ID NO: 94817 - protein, 325 aa, Salmonella enterica subsp. enterica serovar Typhimurium; identical to SEQ ID NO: 93783

SEQ ID NO: 94818 - protein, 90 aa, Salmonella enterica subsp. enterica serovar Typhimurium; identical to SEQ ID NO: 94110

SEQ ID NO: 94819 - protein, 325 aa, Salmonella enterica subsp. enterica serovar Typhimurium; identical to SEQ ID NO: 93783

SEQ ID NO: 94820 - protein, 90 aa, Salmonella enterica subsp. enterica serovar Typhimurium; identical to SEQ ID NO: 94110

SEQ ID NO: 94821 - protein, 325 aa, Salmonella enterica subsp. enterica serovar Typhimurium; identical to SEQ ID NO: 93783

SEQ ID NO: 94822 - protein, 90 aa, Salmonella enterica subsp. enterica serovar Typhimurium; identical to SEQ ID NO: 94110

SEQ ID NO: 94823 - protein, 325 aa, Salmonella enterica subsp. enterica serovar Typhimurium; identical to SEQ ID NO: 93783

SEQ ID NO: 94824 - protein, 198 aa, Salmonella enterica subsp. enterica serovar Typhimurium; identical to SEQ ID NO: 94112

SEQ ID NO: 94825 - protein, 325 aa, Salmonella enterica subsp. enterica serovar Typhimurium; identical to SEQ ID NO: 93783

SEQ ID NO: 94826 - protein, 198 aa, Salmonella enterica subsp. enterica serovar Typhimurium; identical to SEQ ID NO: 94112

SEQ ID NO: 94827 - protein, 325 aa, Salmonella enterica subsp. enterica serovar Typhimurium; identical to SEQ ID NO: 93783

SEQ ID NO: 94828 - protein, 172 aa, Leclercia adecarboxylata; identical to SEQ ID NO: 93926

SEQ ID NO: 94829 - protein, 297 aa, Leclercia adecarboxylata; identical to SEQ ID NO: 93927

SEQ ID NO: 94830 - protein, 198 aa, Salmonella enterica subsp. enterica serovar Typhimurium; identical to SEQ ID NO: 94112

SEQ ID NO: 94831 - protein, 325 aa, Salmonella enterica subsp. enterica serovar Typhimurium; identical to SEQ ID NO: 93783

SEQ ID NO: 94832 - protein, 172 aa, Leclercia sp. LK8; identical to SEQ ID NO: 93926

SEQ ID NO: 94833 - protein, 297 aa, Leclercia sp. LK8; identical to SEQ ID NO: 93927

SEQ ID NO: 94834 - protein, 196 aa, Chryseobacterium koreense CCUG 49689; identical to SEQ ID NO: 93720

SEQ ID NO: 94835 - protein, 339 aa, Chryseobacterium koreense CCUG 49689; identical to SEQ ID NO: 93721

SEQ ID NO: 94836 - protein, 198 aa, Vibrio crassostreae
MKLKDEIKLYILSLAVLFFIVLLITFRADVSPDNYVEIMSYWDWTVLWLTSNWLPTLMIASMLYCEVIRREFEHKLDGGAGDSLYITDCKSENYEQLTFLATYIIPFFGFSFTEPGRLLAYGVLLFVIGMIFVKTDKYYANPTLALFGYKLYRVTMADAQQRYESVIVITKSDLNNNQSVNYKLLSHNVFFVRKVRLE

SEQ ID NO: 94837 - protein, 317 aa, Vibrio crassostreae
MNNAEIKANLGLFATNCTGIEIFIVDQEDNLTRSDIQNSALDGARNAFTDALKKKYIENESFTIPYLSNHDDRKHALYQFDFDESPQAFDLVNTAMVATAETEMPTYEARDNKLENIKALIIVLKNRDGHKAGFYQHVYGVTLLKSGKGILNLMAHETRVVKLQQDILRVSPNFIFLKMGDVYLVESVNGLENQLNFKDVIQRKAEVLTETLVGMNFSDDFNIFIEKVQEDISFARKVVKVCTHSAVLEQEITTAELIEFVKQEEHYANVLKFNDDETQFDLNSINRCRKFLELLDDDLLRSPLTNKSYIARSKDRV

SEQ ID NO: 94838 - protein, 198 aa, Vibrio crassostreae; identical to SEQ ID NO: 94836

SEQ ID NO: 94839 - protein, 317 aa, Vibrio crassostreae; identical to SEQ ID NO: 94837

SEQ ID NO: 94840 - protein, 198 aa, Vibrio crassostreae; identical to SEQ ID NO: 94836

SEQ ID NO: 94841 - protein, 317 aa, Vibrio crassostreae; identical to SEQ ID NO: 94837

SEQ ID NO: 94842 - protein, 198 aa, Vibrio crassostreae; identical to SEQ ID NO: 94836

SEQ ID NO: 94843 - protein, 317 aa, Vibrio crassostreae; identical to SEQ ID NO: 94837

SEQ ID NO: 94844 - protein, 193 aa, Bordetella hinzii
MTNVHRKVDLYILSLGLLFVFFIIIAAEPPASSFSFKDAGSWKALVVNNPLPVVSILGLIYCLFAYIRFDFDLKGANEIPFEVKKLENINYEHLTFLATYVVPLISFDFGNGRQMIVLTLLLVVMGIIYIKTDLFYANPSLALLGFHIYRASGHFKNGEREGITLICRERLAENQKVSYIKLDDRIYYVRGIK

SEQ ID NO: 94845 - protein, 322 aa, Bordetella hinzii
MIAEELKTALQAYYSDQANIGVCMYALMKDAENPGPFKLDIEADAEAGLKALFLQSLRDEISSKEELSVLALSSADERVNAIYIYDLDIPEELTSLEAVIAQDNLPMLDLNEKSLSSIKALLIEMGNDIGQLVLYKTMASVNIFGRSSFFLRKHESRLEQLNDEFLRVSAGFQMLRINDALLVLNLEALEHNFGFHDVIKKEAALGIDAIVSAALVTNPNVLRELVDDVKYARRLTKIAKASPVLKAGISGESVVQFCKTFPHLVGRVRFNEEGNKVVLDTKVSKDLFIKILMDEFLTSELTQFHYASVAKDAVDPSVEEAN

SEQ ID NO: 94846 - protein, 212 aa, Clostridium bolteae WAL-14578; identical to SEQ ID NO: 94008

SEQ ID NO: 94847 - protein, 342 aa, Clostridium bolteae WAL-14578; identical to SEQ ID NO: 93737

SEQ ID NO: 94848 - protein, 211 aa, Yersinia enterocolitica; identical to SEQ ID NO: 93800

SEQ ID NO: 94849 - protein, 335 aa, Yersinia enterocolitica; identical to SEQ ID NO: 93801

SEQ ID NO: 94850 - protein, 211 aa, Yersinia enterocolitica; identical to SEQ ID NO: 93800

SEQ ID NO: 94851 - protein, 335 aa, Yersinia enterocolitica; identical to SEQ ID NO: 93801

SEQ ID NO: 94852 - protein, 211 aa, Yersinia enterocolitica; identical to SEQ ID NO: 93800

SEQ ID NO: 94853 - protein, 335 aa, Yersinia enterocolitica; identical to SEQ ID NO: 93801

SEQ ID NO: 94854 - protein, 199 aa, Yersinia enterocolitica
MATKKKDWSVIKRKVDLYILSLWLLFIFFIIITVKVPICFGEQCKFIGWWELITNNIIPIISMMFVVYGFIAYKRFKYDTKGSAEIPFEIKKVESINYEHLTFLATYVIPLITFDFEKPRYIYVLVLLLVVMGIIYIKTDLFYANPSLALLGFHIYKVEGEFKGGELREGMIVIARRHLNKGDKVRYIKLDDRVYYSDN

SEQ ID NO: 94855 - protein, 328 aa, Yersinia enterocolitica
MPQDLITKDDLDKKLSYFIDNFDDLGIVVYAILKDSPIPKKMDIEGDAQSGLKKLFLDNIKNNIIENDELNIIQLSSSDERTKVIYQYDLDVPEELSVISSVLTNKEFPDFNFKQDVVDNIKVLLIEIGDNVEQIVLYKTMASVNIFTRSSFFLKKSKTRFDKINEDFFRISDGFQIMQLSSGLFVINLETIEKLFGFHEVIKREATQGMAAIEAKNIVSNMDVLKELIDDVKYARKLTKVAKASPVLKADIENNKIIQFCQIYPSLKGRIRFNEDKTQIVLDTKVSKDLFIKLLMDDFLTSQLTDFYYNSIAKDTVDVVEHDNQDVA

SEQ ID NO: 94856 - protein, 171 aa, Yersinia frederiksenii
MNKFARLLLTASSIAPVCITLAFIGLVKDARWLVYSSVTICLLSWFSCIFFIRFAKRNLVELNKNIDSISPANKEVTNYFLSYLFPLLGTESISSDWKYALFFYASLLFYISFSENYNFNPLLSMLGYKFYEAEDDTGVGFVLISEDVITDVRNKDFKTIKLTDYTYLHIK

SEQ ID NO: 94857 - protein, 290 aa, Yersinia frederiksenii
MPLFAVMDRNTASRIMRIDTDKDTDQKLVKMFNEQHAKFESHNDTEISFFAGYKPSYSECFYLDDFAETNELIDAIKRSTAVPVWDPKTVPMEHIKALFVAVENAKNGNKIALQTFNKSQILDVSKSLWLSNNVFTMSSSVGFNIDEKLVATIHGKKIKFKSLQKLRSIFNMDIYFSEATNKDLTDFCAHEAFKLADGFDMNIIADTVIRTKITLINKSKILDDYDIGTLKLAAEKIKFDLQTYNENGVEKISMPSTKKEVKALLTFLDEDIFTAEISKKVFRSNSKRPY

SEQ ID NO: 94858 - protein, 211 aa, Yersinia enterocolitica; identical to SEQ ID NO: 93800

SEQ ID NO: 94859 - protein, 335 aa, Yersinia enterocolitica; identical to SEQ ID NO: 93801

SEQ ID NO: 94860 - protein, 211 aa, Yersinia enterocolitica; identical to SEQ ID NO: 93800

SEQ ID NO: 94861 - protein, 335 aa, Yersinia enterocolitica; identical to SEQ ID NO: 93801

SEQ ID NO: 94862 - protein, 108 aa, Methylophilus sp. TWE2
MFTYTIPYMMSFYKFDLGDWKLLVCLFIFLALLFVLSYRTQNVFVNPVLALAGYGLYDCQFKEGAQEKQGLLLSKEHFQVGDYCAIKRLSNLMYFVTQVEKKGNDSDD

SEQ ID NO: 94863 - protein, 313 aa, Methylophilus sp. TWE2
MTVTTSANQSLQTLRGTDFKHWLTTFWLVKRKLSQQQAKYSVFKVDTDARLEQKLKHAVTAKISDQGYQLDAYDFLTADQDNGLLTIESAATDVTLIQAEIDKGTANPKVEKYEDLLDSWAMVIKLEHQDKALYAYRKIHKFTNPAKLAHVSFLQFKDQELKDLDQQEIFTIDTQVDFFSYEGTTFIANKKEFESTLNFRAGMEKNRDVVLQEFVDLNIFSDASLLKEHIGTNLNYLRKVSSIQKSGYYKDAKFLEELVKVNAQKGWGLVIENGAIVINEASIDLVLTLLNNGRLESPINHEMFDAPVKKKVT

SEQ ID NO: 94864 - protein, 192 aa, Bacillus sp. FJAT-27997
MISVLFRIGLYVSSFFPLYVLLIIDNYEYYSTWREFKNILLYENFLPSTFSYVLLILIILSFISLYIIMKIRLNEKHKFIGVCKTEDNLLSYVVTYLVPILSIDITKANSLLVNLGLFSLLGFIYVKNSLVYLNPLFLFFRYNVFLTENNEVLISDLDIYELKNLEGERIRTRVLSYKIYLVRKKDSLPTNH

SEQ ID NO: 94865 - protein, 310 aa, Bacillus sp. FJAT-27997
MEGGIKMNVTDLVNILNGLDDQDLDMRLYFTRKKPNGKYQSYSPTIDPDLQKEIKDIVKLAVEKVQNVEQRPFSPIGTIEGCIETYAPNEVTSFNDILESMSEDFVSRKEIPPEEISKLTFYCLKIYTEEGDILFFRRVTKFNRLKGGFFGKFTNGDFMKLDGTLLGIDPNVDIVILGEEMLILNHISLERIFSIQDQYHEKASQTLDLVRRTNRITNYEQFREDCLSDGRVTRALTKLLNEEDSMHQVFENFENVIQVIDIFGLNIEIAEENTKLVYEDKSQLLDITRLMRDSFYRSWINNRDGFDEGV

SEQ ID NO: 94866 - protein, 191 aa, Leuconostoc mesenteroides subsp. cremoris
MKKIYKFVVKSSMFICSYFPLYLLLIISNYDYIFRIKPKDKIDGLYLVICFVLIFFIIISIFVSSISLGSKPNVRTLTIEQVKRPTDTIISYVATYILPMTTIEFGKNFSNLMMNVMFFCFIGLLYTKLGLIYMNPIFVLFNFKPYDAKGKIIFSNLPYEKISQKGITWNATSIGGFVYVVRKKYNEKSLK

SEQ ID NO: 94867 - protein, 307 aa, Leuconostoc mesenteroides subsp. cremoris
MELTELQDFLAHPDTDMSLFFTRKVSNNLNFISYRSAVGDNIRDTLMDLFVNYVNSLILENAEVEEYNPTGVADGTYETVNTSEISCYSQYEDSLADANNNEDLEDEADNLNFYTVILTNHTLHQSYKLIRRVTKFKRLYSKGVVAFFRGQELNRIDAKMIGLDGQIDIIQHDNELLLLNHIAIERVFFMDETFNSKATEMLTLIKTGGYITNFDDFEEACLSDKRIQKTITKMANEDINWENALNNFDEVITTIDMFDLNIEYNQIPKNTLIFESKNQVMPILNLVRDSYYRTLINNHLGTDKRIG

SEQ ID NO: 94868 - protein, 198 aa, Salmonella enterica subsp. enterica serovar Typhimurium; identical to SEQ ID NO: 94112

SEQ ID NO: 94869 - protein, 215 aa, Salmonella enterica subsp. enterica serovar Typhimurium
MFTAIDNILNPTQLSGEAYFVAEHQGQLDIFRVALEPGAEQKLTQSFSRSLKRDVVDPNTGQNTLPLVSSLLSRDKQVHEYDHQVINYLPPALAKMADVLSFGVNNTPTDFDFAQQNLSTVKGIVYYLCDGQGNGVVVYQHKYPIALHKKTKLSYFSANGRTLDEVTHDSIDINGNVDFFYFDNKYYALNINLLERAYGLEQVINNLAANATPHI

SEQ ID NO: 94870 - protein, 196 aa, Yersinia frederiksenii
MNPRLLFAFAIFLGSYLPLSTILLVQDIDDKKKNGRLCWDFLTSATCSIPLQKPFLSIGFFLVCLTCLLVSWVALKFAGSEGRKIKIIDSKYCPSDLMNYVLPYIVSFMSIDYLQANKFLGFIIFLLWLFWLSYKSGQIILNPMLMVFNWKMYEVTYRFPGSQDVFSGVVLSNLSIEPNSDYEYETVQSVIVIDKG

SEQ ID NO: 94871 - protein, 303 aa, Yersinia frederiksenii
MLETLKDFNLQEAELSVWVFKKRTSEGNPIFTGKWITVDQMLKQELIGFIDDERENYTEVVNYSLLAQNNENSLMHIGTGETSAVSVAVVSANQTPEKKVTDIKELSNCEFYSVKLVIGDVVLHCVKKTDSSWSTKKSKGFKNIIYKNNKLSIDDTPKFNISRDFDFFVLEDNVFIKNKKIFESVLSYKKSHISNFSELVGEAEFSQAFTDAEPLKKYVGNNAMQLRRASAIKQKGYYKNPDFMRSLQGNANRLRLNLQFDKNGKIIVNDECCADIFQALLDHRLQSHFAAHIYDVPNASMVS

SEQ ID NO: 94872 - protein, 175 aa, Candidatus Burkholderia brachyanthoides
MLSRLVRVLLALTAISPLSVSLAFQFARSRNYVWAAVAFAACLALGFLARAIIAASARRLETLRVTIHKAKSADKEVIGFFIAYALPLIFKPQPSSPDLVAWLVAAAMLLFVLWGTQSTQVNPVLGLLGYHFYEVDTDGGVSYLMITRRRISNVLSVKRVVQISDFGILEAPDQE

SEQ ID NO: 94873 - protein, 240 aa, Candidatus Burkholderia brachyanthoides
MTLFALMKAPAPRILRFSLTAELQREVQRTFTEQLAFFENSIEEVFAFDGRYSPESDEALEIAGFQDVDGIMNAIDRPLFIDRFDPNRHSAENILALFMGHKHSIRQAALIQIFDRRRIISKKHLSMFYSGDTFQQIRDDGITLGDSLLAVLENGALKFKSFHLLRRVFDLSQHYQEATNEDVETFALHNALSVLDVDGFVASAKPACPKKNLFYQQIRRSRRAFRQGNRRSRAAIQVGD

SEQ ID NO: 94874 - protein, 197 aa, Pantoea vagans
MGNVKLKILLYILSLWLLFFSLFIMSWDSSFINKSMTYIFGSKEISLSLIGKMKTRNFVFLISVLFMFIGFFGVWFFYMITSSGWSGPEKVCDVTNENHEHLEFLTTYVMPLVFTDVNSKRTAINLMVMIIAIGAIYIRTNKFYSNPSLAIIGFKIYKSKIKGQGNKEYILICRGYVMDDAAITYIKLDESTLLVKV

SEQ ID NO: 94875 - protein, 320 aa, Pantoea vagans
MFGSLMPICTSQQTSCELFFILSPSNGLPKFYRKVNLDPLAQKDLTEIFKKKVFEEIINKTNGLPSLSLVSSLSSKGNDIYEYDISNQVTEFGLIEDISKLTVSSNPTIFNFSKDEISEIRGLVLRLSDGNDSIYIYQHTYQVSLHKKSRFSFMKSTTGNVLEGVDRDMLDIRKDFDFFFYQGKHYIINLNLLEREYGLNAIIDNMVNLAIPNIISMNVINMTGVVNQNAFFDEIKSNRTYMKKLAKIHNSGLPAVTIPQIQTILNDFPKFGRELSINNNLLDLNSKRRKMFFIRLLNDEAVRSALTNSVYLADDRESAV

SEQ ID NO: 94876 - protein, 198 aa, Salmonella enterica subsp. enterica serovar Typhimurium var. 5-; identical to SEQ ID NO: 94112

SEQ ID NO: 94877 - protein, 325 aa, Salmonella enterica subsp. enterica serovar Typhimurium var. 5-; identical to SEQ ID NO: 93783

SEQ ID NO: 94878 - protein, 198 aa, Salmonella enterica subsp. enterica serovar Typhimurium var. 5-; identical to SEQ ID NO: 94112

SEQ ID NO: 94879 - protein, 325 aa, Salmonella enterica subsp. enterica serovar Typhimurium var. 5-; identical to SEQ ID NO: 93783

SEQ ID NO: 94880 - protein, 198 aa, Salmonella enterica subsp. enterica serovar Typhimurium var. 5-; identical to SEQ ID NO: 94112

SEQ ID NO: 94881 - protein, 325 aa, Salmonella enterica subsp. enterica serovar Typhimurium var. 5-; identical to SEQ ID NO: 93783

SEQ ID NO: 94882 - protein, 214 aa, Salmonella enterica subsp. enterica serovar Agona; identical to SEQ ID NO: 94460

SEQ ID NO: 94883 - protein, 381 aa, Salmonella enterica subsp. enterica serovar Agona; identical to SEQ ID NO: 94125

SEQ ID NO: 94884 - protein, 198 aa, Salmonella enterica subsp. enterica serovar Typhimurium var. 5-; identical to SEQ ID NO: 94112

SEQ ID NO: 94885 - protein, 325 aa, Salmonella enterica subsp. enterica serovar Typhimurium var. 5-; identical to SEQ ID NO: 93783

SEQ ID NO: 94886 - protein, 198 aa, Salmonella enterica subsp. enterica serovar Typhimurium var. 5-; identical to SEQ ID NO: 94112

SEQ ID NO: 94887 - protein, 325 aa, Salmonella enterica subsp. enterica serovar Typhimurium var. 5-; identical to SEQ ID NO: 93783

SEQ ID NO: 94888 - protein, 198 aa, Salmonella enterica subsp. enterica serovar Hadar; identical to SEQ ID NO: 94112

SEQ ID NO: 94889 - protein, 325 aa, Salmonella enterica subsp. enterica serovar Hadar; identical to SEQ ID NO: 93783

SEQ ID NO: 94890 - protein, 198 aa, Salmonella enterica subsp. enterica serovar Typhimurium var. 5-; identical to SEQ ID NO: 94112

SEQ ID NO: 94891 - protein, 325 aa, Salmonella enterica subsp. enterica serovar Typhimurium var. 5-; identical to SEQ ID NO: 93783

SEQ ID NO: 94892 - protein, 198 aa, Salmonella enterica subsp. enterica serovar Hadar; identical to SEQ ID NO: 94112

SEQ ID NO: 94893 - protein, 325 aa, Salmonella enterica subsp. enterica serovar Hadar; identical to SEQ ID NO: 93783

SEQ ID NO: 94894 - protein, 198 aa, Salmonella enterica subsp. enterica serovar Typhimurium var. 5-; identical to SEQ ID NO: 94112

SEQ ID NO: 94895 - protein, 325 aa, Salmonella enterica subsp. enterica serovar Typhimurium var. 5-; identical to SEQ ID NO: 93783

SEQ ID NO: 94896 - protein, 198 aa, Salmonella enterica subsp. enterica serovar Typhimurium var. 5-; identical to SEQ ID NO: 94112

SEQ ID NO: 94897 - protein, 325 aa, Salmonella enterica subsp. enterica serovar Typhimurium var. 5-; identical to SEQ ID NO: 93783

SEQ ID NO: 94898 - protein, 198 aa, Salmonella enterica subsp. enterica serovar Typhimurium var. 5-; identical to SEQ ID NO: 94112

SEQ ID NO: 94899 - protein, 325 aa, Salmonella enterica subsp. enterica serovar Typhimurium var. 5-; identical to SEQ ID NO: 93783

SEQ ID NO: 94900 - protein, 198 aa, Salmonella enterica subsp. enterica serovar Hadar; identical to SEQ ID NO: 94112

SEQ ID NO: 94901 - protein, 325 aa, Salmonella enterica subsp. enterica serovar Hadar; identical to SEQ ID NO: 93783

SEQ ID NO: 94902 - protein, 198 aa, Salmonella enterica subsp. enterica serovar Typhimurium var. 5-; identical to SEQ ID NO: 94112

SEQ ID NO: 94903 - protein, 325 aa, Salmonella enterica subsp. enterica serovar Typhimurium var. 5-; identical to SEQ ID NO: 93783

SEQ ID NO: 94904 - protein, 198 aa, Salmonella enterica subsp. enterica serovar Typhimurium var. 5-; identical to SEQ ID NO: 94112

SEQ ID NO: 94905 - protein, 325 aa, Salmonella enterica subsp. enterica serovar Typhimurium var. 5-; identical to SEQ ID NO: 93783

SEQ ID NO: 94906 - protein, 198 aa, Salmonella enterica subsp. enterica serovar Hadar; identical to SEQ ID NO: 94112

SEQ ID NO: 94907 - protein, 325 aa, Salmonella enterica subsp. enterica serovar Hadar; identical to SEQ ID NO: 93783

SEQ ID NO: 94908 - protein, 198 aa, Salmonella enterica subsp. enterica serovar Typhimurium var. 5-; identical to SEQ ID NO: 94112

SEQ ID NO: 94909 - protein, 325 aa, Salmonella enterica subsp. enterica serovar Typhimurium var. 5-; identical to SEQ ID NO: 93783

SEQ ID NO: 94910 - protein, 198 aa, Salmonella enterica subsp. enterica serovar Hadar; identical to SEQ ID NO: 94112

SEQ ID NO: 94911 - protein, 325 aa, Salmonella enterica subsp. enterica serovar Hadar; identical to SEQ ID NO: 93783

SEQ ID NO: 94912 - protein, 198 aa, Salmonella enterica subsp. enterica serovar Typhimurium var. 5-; identical to SEQ ID NO: 94112

SEQ ID NO: 94913 - protein, 325 aa, Salmonella enterica subsp. enterica serovar Typhimurium var. 5-; identical to SEQ ID NO: 93783

SEQ ID NO: 94914 - protein, 198 aa, Salmonella enterica subsp. enterica serovar Typhimurium var. 5-; identical to SEQ ID NO: 94112

SEQ ID NO: 94915 - protein, 325 aa, Salmonella enterica subsp. enterica serovar Typhimurium var. 5-; identical to SEQ ID NO: 93783

SEQ ID NO: 94916 - protein, 198 aa, Salmonella enterica subsp. enterica serovar Hadar; identical to SEQ ID NO: 94112

SEQ ID NO: 94917 - protein, 325 aa, Salmonella enterica subsp. enterica serovar Hadar; identical to SEQ ID NO: 93783

SEQ ID NO: 94918 - protein, 198 aa, Salmonella enterica subsp. enterica serovar Typhimurium var. 5-; identical to SEQ ID NO: 94112

SEQ ID NO: 94919 - protein, 325 aa, Salmonella enterica subsp. enterica serovar Typhimurium var. 5-; identical to SEQ ID NO: 93783

SEQ ID NO: 94920 - protein, 198 aa, Salmonella enterica subsp. enterica serovar Hadar; identical to SEQ ID NO: 94112

SEQ ID NO: 94921 - protein, 325 aa, Salmonella enterica subsp. enterica serovar Hadar; identical to SEQ ID NO: 93783

SEQ ID NO: 94922 - protein, 198 aa, Salmonella enterica subsp. enterica serovar Typhimurium var. 5-; identical to SEQ ID NO: 94112

SEQ ID NO: 94923 - protein, 325 aa, Salmonella enterica subsp. enterica serovar Typhimurium var. 5-; identical to SEQ ID NO: 93783

SEQ ID NO: 94924 - protein, 167 aa, Salmonella enterica subsp. enterica serovar Agona; identical to SEQ ID NO: 94124

SEQ ID NO: 94925 - protein, 381 aa, Salmonella enterica subsp. enterica serovar Agona; identical to SEQ ID NO: 94125

SEQ ID NO: 94926 - protein, 198 aa, Salmonella enterica subsp. enterica serovar Typhimurium var. 5-; identical to SEQ ID NO: 94112

SEQ ID NO: 94927 - protein, 325 aa, Salmonella enterica subsp. enterica serovar Typhimurium var. 5-; identical to SEQ ID NO: 93783

SEQ ID NO: 94928 - protein, 198 aa, Salmonella enterica subsp. enterica serovar Typhimurium var. 5-; identical to SEQ ID NO: 94112

SEQ ID NO: 94929 - protein, 325 aa, Salmonella enterica subsp. enterica serovar Typhimurium var. 5-; identical to SEQ ID NO: 93783

SEQ ID NO: 94930 - protein, 198 aa, Salmonella enterica subsp. enterica serovar Typhimurium var. 5-; identical to SEQ ID NO: 94112

SEQ ID NO: 94931 - protein, 325 aa, Salmonella enterica subsp. enterica serovar Typhimurium var. 5-; identical to SEQ ID NO: 93783

SEQ ID NO: 94932 - protein, 198 aa, Salmonella enterica subsp. enterica serovar Typhimurium var. 5-; identical to SEQ ID NO: 94112

SEQ ID NO: 94933 - protein, 325 aa, Salmonella enterica subsp. enterica serovar Typhimurium var. 5-; identical to SEQ ID NO: 93783

SEQ ID NO: 94934 - protein, 196 aa, Yersinia intermedia
MRLTGNIDKIGLYILSLSLLFIFIIILSANVPYCFGNSCKFIGLTKLLSINLVPVVCIFFIFIGWVFYKRFKNITSYNGLESVKITHCESESYENLTFLATYIVPFMGFSFDDMQKNLAYILLIVVIGIIFVKTNKYYANPTLALFGYKLYKVNIFHPGSGETKNVIAITTDNLMVGDNVFYSFLDDYVFIARKKI

SEQ ID NO: 94935 - protein, 317 aa, Yersinia intermedia
MTVDIFKGKIAEVIENLSGVKLVFFVIDGEETKIEVSKIEPEALTKIGANFASRLRDDIVTNEDLTLPLLTNIDDRKNALYLFDYAQKPYEFEILKQALELPPNYNNYYAPDNGFSNVKSLAIVLSSDTDSIALYKNKTNLTVLKSNSNMLNFLFNKNGVLEEISSDIFKIDFGYDLILLDNSYYIKNTKTLEIAMKFHEVITAQASIAIESLAQSEMIADMTHLNKSSKDLPFARKLAKVAKHSPVLGKIDAPTVIDFVSKHKYLSTIISINDSGDKFIVKTKSSQKHFIKLLSDDYLESELTKILYDSLAKDMLQ

SEQ ID NO: 94936 - protein, 198 aa, Salmonella enterica subsp. enterica serovar Typhimurium var. 5-; identical to SEQ ID NO: 94112

SEQ ID NO: 94937 - protein, 325 aa, Salmonella enterica subsp. enterica serovar Typhimurium var. 5-; identical to SEQ ID NO: 93783

SEQ ID NO: 94938 - protein, 198 aa, Salmonella enterica subsp. enterica serovar I 4,12:i:-; identical to SEQ ID NO: 94112

SEQ ID NO: 94939 - protein, 325 aa, Salmonella enterica subsp. enterica serovar I 4,12:i:-; identical to SEQ ID NO: 93783

SEQ ID NO: 94940 - protein, 171 aa, Yersinia pseudotuberculosis
MNKFARLLLTASSIAPVCITLAFIGLVKDAQWLVYSSVTICLLSWSSCIFFIKFAKKNLVELNKNIDSISPANKEVTNYFLSYLFPLLGVESISSDWKYALFFYISLLFYMSFSENYNFNPLLSTLGYKFYEAEDDTGVGFVLISEEVITDVRDREFKVIKLTDYTYLHIK

SEQ ID NO: 94941 - protein, 290 aa, Yersinia pseudotuberculosis
MPLFAVMDRNTASRIMRIETDKDTDHTLVKMFNEQYAKFELHHDTEVSFFAGYKPSFSECFYLEGFTESNELIDAIKRSTAVPVWDPKTVPMEHIKALFVAVENTKNINKIALQTFNKSQILDVSKSLWLSDNVFTMSSSVGFNIDEKLVATIHGNKIKFKSLQKLRSIFDMDIYFSEATNKDLTDFCAHEAFKITEGFDMNIIADTVIRTKITLINKSRILDDYDIDTLKLAADKVNFDLQTYNENGIEKISMPSTKKEVKSLLTFLDEDIFTAEISKKVFRSNSKRPY

SEQ ID NO: 94942 - protein, 198 aa, Salmonella enterica subsp. enterica serovar Typhimurium var. 5-; identical to SEQ ID NO: 94112

SEQ ID NO: 94943 - protein, 325 aa, Salmonella enterica subsp. enterica serovar Typhimurium var. 5-; identical to SEQ ID NO: 93783

SEQ ID NO: 94944 - protein, 198 aa, Salmonella enterica subsp. enterica serovar Hadar; identical to SEQ ID NO: 94112

SEQ ID NO: 94945 - protein, 325 aa, Salmonella enterica subsp. enterica serovar Hadar; identical to SEQ ID NO: 93783

SEQ ID NO: 94946 - protein, 198 aa, Salmonella enterica subsp. enterica serovar I 4,5,12:i-; identical to SEQ ID NO: 94112

SEQ ID NO: 94947 - protein, 325 aa, Salmonella enterica subsp. enterica serovar I 4,5,12:i-; identical to SEQ ID NO: 93783

SEQ ID NO: 94948 - protein, 198 aa, Salmonella enterica subsp. enterica serovar Typhimurium var. 5-; identical to SEQ ID NO: 94112

SEQ ID NO: 94949 - protein, 325 aa, Salmonella enterica subsp. enterica serovar Typhimurium var. 5-; identical to SEQ ID NO: 93783

SEQ ID NO: 94950 - protein, 198 aa, Salmonella enterica subsp. enterica serovar Typhimurium var. 5-; identical to SEQ ID NO: 94112

SEQ ID NO: 94951 - protein, 325 aa, Salmonella enterica subsp. enterica serovar Typhimurium var. 5-; identical to SEQ ID NO: 93783

SEQ ID NO: 94952 - protein, 198 aa, Salmonella enterica subsp. enterica serovar Hadar; identical to SEQ ID NO: 94112

SEQ ID NO: 94953 - protein, 325 aa, Salmonella enterica subsp. enterica serovar Hadar; identical to SEQ ID NO: 93783

SEQ ID NO: 94954 - protein, 198 aa, Salmonella enterica subsp. enterica serovar Typhimurium; identical to SEQ ID NO: 94112

SEQ ID NO: 94955 - protein, 325 aa, Salmonella enterica subsp. enterica serovar Typhimurium; identical to SEQ ID NO: 93783

SEQ ID NO: 94956 - protein, 198 aa, Salmonella enterica subsp. enterica serovar I 4,5,12:i-; identical to SEQ ID NO: 94112

SEQ ID NO: 94957 - protein, 208 aa, Salmonella enterica subsp. enterica serovar I 4,5,12:i-
MFTAIDNILNSTQLSGEAYFVAEHQGQLDIFRVALEPGAEQKLTQSFSRSLKRDVVDPNTGQNTLPLVSSLLSRDKQVHEYDHQVINYLPPALAKMADVLSFGVNNTPTDFDFAQQNLSTVKGIVYYLCDGQGNGVVVYQHKYPIALHKKTKLSYFSANGRTLDEVTHDSIDINGNVDFFYFDNKYYALNINLLERAYGLEQVINNLA

SEQ ID NO: 94958 - protein, 198 aa, Salmonella enterica subsp. enterica serovar I 4,5,12:i-; identical to SEQ ID NO: 94112

SEQ ID NO: 94959 - protein, 325 aa, Salmonella enterica subsp. enterica serovar I 4,5,12:i-; identical to SEQ ID NO: 93783

SEQ ID NO: 94960 - protein, 198 aa, Salmonella enterica subsp. enterica serovar I 4,5,12:i-; identical to SEQ ID NO: 94112

SEQ ID NO: 94961 - protein, 325 aa, Salmonella enterica subsp. enterica serovar I 4,5,12:i-; identical to SEQ ID NO: 93783

SEQ ID NO: 94962 - protein, 198 aa, Salmonella enterica subsp. enterica serovar Hadar; identical to SEQ ID NO: 94112

SEQ ID NO: 94963 - protein, 325 aa, Salmonella enterica subsp. enterica serovar Hadar; identical to SEQ ID NO: 93783

SEQ ID NO: 94964 - protein, 198 aa, Salmonella enterica subsp. enterica serovar Hadar; identical to SEQ ID NO: 94112

SEQ ID NO: 94965 - protein, 325 aa, Salmonella enterica subsp. enterica serovar Hadar; identical to SEQ ID NO: 93783

SEQ ID NO: 94966 - protein, 198 aa, Salmonella enterica subsp. enterica serovar Hadar; identical to SEQ ID NO: 94112

SEQ ID NO: 94967 - protein, 325 aa, Salmonella enterica subsp. enterica serovar Hadar; identical to SEQ ID NO: 93783

SEQ ID NO: 94968 - protein, 198 aa, Salmonella enterica subsp. enterica serovar Hadar; identical to SEQ ID NO: 94112

SEQ ID NO: 94969 - protein, 325 aa, Salmonella enterica subsp. enterica serovar Hadar; identical to SEQ ID NO: 93783

SEQ ID NO: 94970 - protein, 198 aa, Salmonella enterica subsp. enterica serovar Hadar; identical to SEQ ID NO: 94112

SEQ ID NO: 94971 - protein, 325 aa, Salmonella enterica subsp. enterica serovar Hadar; identical to SEQ ID NO: 93783

SEQ ID NO: 94972 - protein, 198 aa, Salmonella enterica subsp. enterica serovar I 4,12:i:-; identical to SEQ ID NO: 94112

SEQ ID NO: 94973 - protein, 325 aa, Salmonella enterica subsp. enterica serovar I 4,12:i:-; identical to SEQ ID NO: 93783

SEQ ID NO: 94974 - protein, 198 aa, Salmonella enterica subsp. enterica serovar Hadar; identical to SEQ ID NO: 94112

SEQ ID NO: 94975 - protein, 325 aa, Salmonella enterica subsp. enterica serovar Hadar; identical to SEQ ID NO: 93783

SEQ ID NO: 94976 - protein, 198 aa, Salmonella enterica subsp. enterica serovar Typhimurium; identical to SEQ ID NO: 94112

SEQ ID NO: 94977 - protein, 325 aa, Salmonella enterica subsp. enterica serovar Typhimurium; identical to SEQ ID NO: 93783

SEQ ID NO: 94978 - protein, 198 aa, Salmonella enterica subsp. enterica serovar I 4,5,12:i-; identical to SEQ ID NO: 94112

SEQ ID NO: 94979 - protein, 325 aa, Salmonella enterica subsp. enterica serovar I 4,5,12:i-; identical to SEQ ID NO: 93783

SEQ ID NO: 94980 - protein, 198 aa, Salmonella enterica subsp. enterica serovar I 4,12:i:-; identical to SEQ ID NO: 94112

SEQ ID NO: 94981 - protein, 325 aa, Salmonella enterica subsp. enterica serovar I 4,12:i:-; identical to SEQ ID NO: 93783

SEQ ID NO: 94982 - protein, 173 aa, Klebsiella variicola; identical to SEQ ID NO: 93860

SEQ ID NO: 94983 - protein, 289 aa, Klebsiella variicola; identical to SEQ ID NO: 94027

SEQ ID NO: 94984 - protein, 169 aa, Klebsiella variicola
MNKIARFLLTASSIAPVGITLIFIGYMKNKPWLIWWSLGICLASFISVIFFLHYANKNLPSLYKNVETISPANKEVTNYFLSYLFPLLGTDSIADKWQYAVFFYISLIVYICFSENYNFNPLISALGFKFYEAEDDTGVGFVLISKEVITNLKTEILKLFNLQTTHLCM

SEQ ID NO: 94985 - protein, 208 aa, Klebsiella variicola
MPLWTKNVGLNDITAFFMAPAYPQVKDKIAIQTFSKKQILNESRYLWLSKNSFTMSDLLGFNLDDKLVAILEGDKIKFRNFNNLRSIFDMSSYFAEATKQEISDFVNQPVFNIPVGFDLPALADNVIRKKVTLINKSKILVNHTVTEIKNAALTLNFPIKTTGSGSSEKIEMPTNKKEIKELLNFLDEDYFNSEITKQRFRSNSKRKA

SEQ ID NO: 94986 - protein, 192 aa, Pseudomonadaceae bacterium E1086
MQFRIFSAFLIFIGSYLPLALILAIQDIPISWWERPFCDFSNVGECYFNPFANPYLSVVFLLLTILSVSLSNISLKKISFPFKAKVTKAKPIPNDIINYVFPYVVSFMGISYEHPEKLLGFVVFLFWMFAITYKSGQIIMNPLLLMFGWKLYEVEAEINGNERSVRVLFKGNLAPGEYEVQTIQDFYIARGY

SEQ ID NO: 94987 - protein, 304 aa, Pseudomonadaceae bacterium E1086
MTVEFQSLKNFDFDNSNPFLWIFKDSTTASKFRTFYVQTENELNAKLKEFVRNEINRITEHSPYTYISQNNENSCLTLDPSSTDFNSLKALVDRLESEHRISDSKDLKGAKGYLVKFTLNGQTVYAVKRSTSSWKTSYPKKYINMIFSNGELSAVEDNSFSIEKNFDFYVFGNTAFIANKRGFESSMKYREEYVQAFSQLQQSPSFSGLFSDLSSIVEYVGSNSIQLRRMAVIEEKGIYNRPNFIQTLQRISNNRGWGINFDHASNTIVPCSQTVKVIMQVLLDHRLMSEITNNIYDVPDAKEI

SEQ ID NO: 94988 - protein, 195 aa, Vibrio parahaemolyticus
MQFNLIAAFTVFIGSYLPLALILAVQDIPFSWWSRPICKFDDISNCDFIPFTNMWIAIAFIVITLLSVFFSNLTLAKITYPFKVKVKSSKGIPNDIINYVFPYVVSFMGISYDTPEKLLGFAVFLLWMFAITYKSGQIIMNPLLLMFGWKIYEATVDFNGQERDVRFLIKGDLSPGEYRIQKVQEFYIGQVNDNG

SEQ ID NO: 94989 - protein, 301 aa, Vibrio parahaemolyticus
MVDFDALKAFDFANADTYLWVFKESTTKAKFRTKFVQTEAELNKDLKGFICAEINRITEHSPYTYISQTNENSCLTIAFDSTDFKLLKSQVDLPEVEHRVKSVSDLVGAKGYVVKFIKDDVVVYAVKRSTSTWKTSYPKKFVNMVFKNGELKGVENNAFSIEKNFDFYVINDTAFIANKKGFESSMKHKEEYVQAFDTLQKNPGFSSLFSDVSSIVEYVGSNSIQLRRMAVIEEKGIYKQANFIKNLISVNSKRNWGLNFENDKIVPCEKTVKVILQVLLDHRLISEITDHIYDVPDAKPV

SEQ ID NO: 94990 - protein, 194 aa, Vibrio alginolyticus
MRVIDQVKLYILSLMFLFFLVMLISLDTAPCKLAAGCEPLSVIDYIKANWLPCLMVFMIGVCELIRREFEYKLSGNTSDTLRVLESKSESYEHLTFLATYIIPFVGFNFDSIPRLLAYLFLLVIIGLIFIRTGMYYANPTLAIFGYKLYRITLADQNNHYEAVTAIAKDDIKQGVNVYYQFISKTVCFVRKVRE

SEQ ID NO: 94991 - protein, 319 aa, Vibrio alginolyticus
MNTTDAKAAIKEITDSCIGIKIYFVDKSNQIYDSDVDDKLLADYRDDFVDALTRSYSNNENFTCPALSQEDGRNHALYHFDFDDEDKPFEFSFLDTVNNLRADEPLDTYPARDAGLGKLRGYIIRLRNTDGKVMSFFQYIHHSYIATPGKTIFLTTHESRVVRLTHDVLRLGNRFVFAKIGDDYLIENVNVLEKEFGFDKIIHSKAVQYCATIEEKSIVNDLTKFKAQLNNDTSFARKLVKVCKGSAVIEKEIANDTIIKFAMSKVYYQEKLKLTEDESQFDLGSINRCRHFLTLLDDEFVKSELTQQEYISKAKDRAS

SEQ ID NO: 94992 - protein, 195 aa, Vibrio parahaemolyticus; identical to SEQ ID NO: 94306

SEQ ID NO: 94993 - protein, 328 aa, Vibrio parahaemolyticus; identical to SEQ ID NO: 94307

SEQ ID NO: 94994 - protein, 198 aa, Salmonella enterica subsp. enterica serovar Typhimurium var. 5-; identical to SEQ ID NO: 94112

SEQ ID NO: 94995 - protein, 325 aa, Salmonella enterica subsp. enterica serovar Typhimurium var. 5-; identical to SEQ ID NO: 93783

SEQ ID NO: 94996 - protein, 198 aa, Salmonella enterica subsp. enterica serovar Typhimurium var. 5-; identical to SEQ ID NO: 94112

SEQ ID NO: 94997 - protein, 325 aa, Salmonella enterica subsp. enterica serovar Typhimurium var. 5-; identical to SEQ ID NO: 93783

SEQ ID NO: 94998 - protein, 198 aa, Salmonella enterica subsp. enterica serovar Typhimurium var. 5-; identical to SEQ ID NO: 94112

SEQ ID NO: 94999 - protein, 325 aa, Salmonella enterica subsp. enterica serovar Typhimurium var. 5-; identical to SEQ ID NO: 93783

SEQ ID NO: 95000 - protein, 198 aa, Salmonella enterica subsp. enterica serovar Typhimurium var. 5-; identical to SEQ ID NO: 94112

SEQ ID NO: 95001 - protein, 325 aa, Salmonella enterica subsp. enterica serovar Typhimurium var. 5-; identical to SEQ ID NO: 93783

SEQ ID NO: 95002 - protein, 198 aa, Salmonella enterica subsp. enterica serovar Typhimurium var. 5-; identical to SEQ ID NO: 94112

SEQ ID NO: 95003 - protein, 325 aa, Salmonella enterica subsp. enterica serovar Typhimurium var. 5-; identical to SEQ ID NO: 93783

SEQ ID NO: 95004 - protein, 194 aa, Stenotrophomonas maltophilia
MQFRMWSAGVLFLGSYAPLAFVLAAQDIKKALWGEPVCGWRGQFDCELQIFEHPWASLAAIVVTSAALWLTMYSMKAVRLKVEAEVLSAKPVPNDLINYVFPYVVSFMGLSYGDPQKLAGFFVFLVLLFLITYRSGQILMNPVLIAFGWRLYEVDIVVGGNRVRKTVRALKQGKLLPGEQLIEDVQEVYLMRDP

SEQ ID NO: 95005 - protein, 306 aa, Stenotrophomonas maltophilia
MSDLALNSLKGFDLAGSKVFLWVFKKSVGAKKFKAYYIKTDPVLEDSLKGFAENERARINEWIPYGHLSQPTDDGCLTIAVGDTDFQVLKDLVDEPEADHATNDLKKLKGAVGYLVKFVKDGETLYATRRTPMTWKPVYKKKNVINAIFKNGQLSAVAGDEFTLEPRFDIFALDDVLLVSNKRGFESMMQYRAGYVQAFGELKAEPSFSALFTDMAPLLEYVGENGTHLKRMAVIQEKSLYSDPKYLKALKTVATKRKWGVTFDKAGKIIPTAANAKVIITLLLDHRLVSEITDIMYDVPDGTPVK

SEQ ID NO: 95006 - protein, 193 aa, Pseudomonas coronafaciens pv. porri; identical to SEQ ID NO: 93722

SEQ ID NO: 95007 - protein, 304 aa, Pseudomonas coronafaciens pv. porri
MQVHFDIFRSFNYIDSTVHLWIFKKSTTDRKFNAAYVQTDETVNTLLKNVLIHEVNRTTEFAQYSYLAQTNDNSCLAAPALATNFSLLKVQVDRPEPECAVNSVDDLKGTQGYVVKFTHNGQTLYAVKRSTASWKTSYPNKFINMVFSNGELTAAEDNGFTIEKNFDFYCSVDTLLITAKRAFESLMQYKEAYTQAFTELQADPDFSNLFADITPLVEYIGTNSTQLRRMATIEQKSLYSNPGFMNSLKQVNALRNWGLNFDQTNDKIIVCSATAPTILQVLLDHRLMSEVTSNIYDVPDAIQI

SEQ ID NO: 95008 - protein, 204 aa, Escherichia coli; identical to SEQ ID NO: 93768

SEQ ID NO: 95009 - protein, 340 aa, Escherichia coli; identical to SEQ ID NO: 93953

SEQ ID NO: 95010 - protein, 199 aa, Pseudomonas stutzeri
MRLTFWVEIVVFLSAYYPLFLILLIRDVKEGGHGIPIGSAEWNLSVTGWGVSLFLVSSVSSLVLAYIMRKLLKRQEGGTAIKVQEADPISGDMLNYTLPFLIGLFAFSYSDWQSIASLLVFLAFMLAFLHKEQITLLNPMLLLMNVRLYKIKYKEVGRERFCSAFALCLGSVEASNVTVNIKETAGITFIYPCGDRTNE

SEQ ID NO: 95011 - protein, 249 aa, Pseudomonas stutzeri
MYTPQDDRFFYVESSATDLSQLISEVETQNLEAVKTIDELNGYNSYAIQVTFGEPEQSVFAYRYIRAAWSAKKTKGNFLEFKTVNGELVVEIDSSTRFEINPYLDFLQFKDDVFIANIASFEVAMNYHERLKEKKEEAIKALFESPNLVVGSEEVFKNLVGLDKRLMRQLAAAHEKGYYSNKEWVAKLRVAAEEAGNWRIKFNDQGEIEIDDDKDYIKELLILLQNKRVKTVVDGIVADVDGELIALAN

SEQ ID NO: 95012 - protein, 205 aa, Vibrio vulnificus
MRKNRLHLGARFSLFIVSYLPLFFIMCFTQVYTYKEHLYWGGFNGKALYNFIKYFGAVSVIIIVSVFGLIGLIVLLKNVKRRCATSGREVKILDIENKNSESITYLFTYLIPFVFQDLSSFTNVVSITILLSVTFLIYVNSGMILINPTISIKYTLYQVTYLDIESDKTRKGMLLTNCKYLEDGDLVEIEDVGHKLFYANLIEDE

SEQ ID NO: 95013 - protein, 339 aa, Vibrio vulnificus
MLELEDLLEYAEELKVDKKAKVSLYFITRHLKPGMSRTAKVLDKYDFKLTQAPISPDIAKFFKDTLSNQISSHASKDDVEFKQYTVIDDDLDNKIYTYALNNAISFSNVINEHIKADNIPVMGKLNDIQSELWAYCIKVQRNKEFTYSFRRISKGKVTTNEPQDLKQKLSAIFDKTGGELKEFDGSVVSFDDKIDCIYIDEQFYVFHKKSFEAIVGLEEEFKEAAVKTLKIIEECNMVEGLDIIEKAIVHKPSLRKTLTHIAEKGNHTSLDVNEVQSMNEVLRKFQNTEFKINDDGKIVLETEADGKNFLRLLNDYYKQGMTTKKYYATDSGSIVNPTN

SEQ ID NO: 95014 - protein, 202 aa, Asanoa ferruginea
MQLRILFAIAIYLGSYLPLSLILLAQDIDTEVVKRGICPVGSMITLGCASPLKNPLYSLAAVAVCAVGMLATFLALRVLRTSQRVKVTESKHIPADLINYVIPYVVSFISLDFDQGTKLIGFTVFLIWIFWITYKSGQIALNPVLAAFGWKLFEVKYIFHGGTSTFVGRVLSKVDIEPDRAYLQGYLQDVMVVRNDEGDASR

SEQ ID NO: 95015 - protein, 304 aa, Asanoa ferruginea
MLPDLKVFNLAEADVTVWVFRRSPGKDGRPKFTGRWVGITDELADKLREAVGGALDGISETIEYDVLVQNNEGSALTIETDETYVHLIAAEVANDTPGRKARSVKDLANSKFCVIKFVKDDKTMLAVSKNDTSWSTRKTAGFIRTVFSDNELGVEESPVFTIRPNFDFFVLGERIFIRSKPNFEAVLVYKAGHEQAFSTLKQEAQFVALFSDLGPLDEFVGSNKIHLRRAIAIHAKGHYKDADFMARLVAEHKNMSLDIAFDGQGRIVPTAETCRHIFQALLNHRLESRLDTKFYDVPSTEPVG

SEQ ID NO: 95016 - protein, 171 aa, Escherichia coli; identical to SEQ ID NO: 93814

SEQ ID NO: 95017 - protein, 297 aa, Escherichia coli; identical to SEQ ID NO: 93815

SEQ ID NO: 95018 - protein, 172 aa, Escherichia coli; identical to SEQ ID NO: 93790

SEQ ID NO: 95019 - protein, 294 aa, Escherichia coli
MALFAVIDNTIATRIVRVELDATASTSVTAIFQQQRQYFESHHNNMIPFYAGYTPKHSECFEIQNFTDSARLIDAVNRPTAVPVWDPSQIDIGYIKALFVGVDAPANPNIIALQTFNKKQILDTSKSFFGKLFASKTTFSKANSIGFNVDDKLVAIIINDTIRFKSFFNLRSIFDMLSYFSAATDQELNAFSQLSVFSTPQGFDLKSVADTVIRNKVTLINQTGMLTPQNMSKFKSEAAKVNFPLQTIIVGGVEKIVMPSSKKEIKALLDFLEEDIWISGISGRRFKSNSKRPI

SEQ ID NO: 95020 - protein, 204 aa, Escherichia coli
MRVNKLHLGARVSLFIVSYLPLFFIMCFVQLYTYSDYLNWKGISIESVTIFFKYFGAVSFLIVLSLFGIFGLKVFLINIKRRCQTSGRTVKILDIENKNNESISYLFTYIIPFVFQDLSKISNVVPIAILLTVTALIYINSSMILINPTISIRYTLYQINYLDIESEKKRSGMILTKSKYLEEDDLLDIEDVGPKLFYAETHKV

SEQ ID NO: 95021 - protein, 340 aa, Escherichia coli
MLKLEELLEYAEQIKDNEKAKITLYFVTRHLKSGMSKAAKVTDKYDFKVVKAPIAPDIADFFKSTLSNQIISHASKDDIEMKNYTVIDDDIDNKIYAYAMNNAISFSKIINEDIKNDRLNVLNSLSEVQEDLWAYCIKVQNGLELTYSFRKISKGKVTTNEPQNIGQRVFALFDKSDKELRAFDGSAINFDDKIDCIYIQNKFYVFHKKSFESIVGLDAEFTEAAQKTLNTIKEFDLVDGLEIIEQAILHKPSLRKTLAHIAEKGNHTTLNKDEVQSMNGVLKMFQDEEFTINDEGKIIIEDERQGRNFLRLLNDYYKQGMTTKKYYGTDSGNLVNPVKS

SEQ ID NO: 95022 - protein, 172 aa, Escherichia coli; identical to SEQ ID NO: 93790

SEQ ID NO: 95023 - protein, 294 aa, Escherichia coli; identical to SEQ ID NO: 93881

SEQ ID NO: 95024 - protein, 172 aa, Escherichia coli; identical to SEQ ID NO: 93790

SEQ ID NO: 95025 - protein, 294 aa, Escherichia coli; identical to SEQ ID NO: 93881

SEQ ID NO: 95026 - protein, 198 aa, Salmonella enterica subsp. enterica serovar Typhimurium; identical to SEQ ID NO: 94112

SEQ ID NO: 95027 - protein, 325 aa, Salmonella enterica subsp. enterica serovar Typhimurium; identical to SEQ ID NO: 93783

SEQ ID NO: 95028 - protein, 198 aa, Salmonella enterica subsp. enterica serovar 4,12:i:-; identical to SEQ ID NO: 94112

SEQ ID NO: 95029 - protein, 325 aa, Salmonella enterica subsp. enterica serovar 4,12:i:-; identical to SEQ ID NO: 93783

SEQ ID NO: 95030 - protein, 198 aa, Salmonella enterica subsp. enterica serovar Typhimurium; identical to SEQ ID NO: 94112

SEQ ID NO: 95031 - protein, 325 aa, Salmonella enterica subsp. enterica serovar Typhimurium; identical to SEQ ID NO: 93783

SEQ ID NO: 95032 - protein, 198 aa, Salmonella enterica subsp. enterica serovar Typhimurium; identical to SEQ ID NO: 94112

SEQ ID NO: 95033 - protein, 325 aa, Salmonella enterica subsp. enterica serovar Typhimurium; identical to SEQ ID NO: 93783

SEQ ID NO: 95034 - protein, 198 aa, Salmonella enterica subsp. enterica serovar Typhimurium; identical to SEQ ID NO: 94112

SEQ ID NO: 95035 - protein, 325 aa, Salmonella enterica subsp. enterica serovar Typhimurium; identical to SEQ ID NO: 93783

SEQ ID NO: 95036 - protein, 198 aa, Salmonella enterica subsp. enterica serovar Typhimurium; identical to SEQ ID NO: 94112

SEQ ID NO: 95037 - protein, 325 aa, Salmonella enterica subsp. enterica serovar Typhimurium; identical to SEQ ID NO: 93783

SEQ ID NO: 95038 - protein, 198 aa, Salmonella enterica subsp. enterica serovar Typhimurium; identical to SEQ ID NO: 94112

SEQ ID NO: 95039 - protein, 325 aa, Salmonella enterica subsp. enterica serovar Typhimurium; identical to SEQ ID NO: 93783

SEQ ID NO: 95040 - protein, 198 aa, Salmonella enterica; identical to SEQ ID NO: 94112
  subsp. enterica serovar Typhimurium str. ST1489

SEQ ID NO: 95041 - protein, 325 aa, Salmonella enterica; identical to SEQ ID NO: 93783
  subsp. enterica serovar Typhimurium str. ST1489

SEQ ID NO: 95042 - protein, 198 aa, Salmonella enterica subsp. enterica serovar Typhimurium; identical to SEQ ID NO: 94112

SEQ ID NO: 95043 - protein, 325 aa, Salmonella enterica subsp. enterica serovar Typhimurium; identical to SEQ ID NO: 93783

SEQ ID NO: 95044 - protein, 198 aa, Salmonella enterica subsp. enterica serovar Typhimurium; identical to SEQ ID NO: 94112

SEQ ID NO: 95045 - protein, 325 aa, Salmonella enterica subsp. enterica serovar Typhimurium; identical to SEQ ID NO: 93783

SEQ ID NO: 95046 - protein, 198 aa, Salmonella enterica subsp. enterica serovar Typhimurium; identical to SEQ ID NO: 94112

SEQ ID NO: 95047 - protein, 325 aa, Salmonella enterica subsp. enterica serovar Typhimurium; identical to SEQ ID NO: 93783

SEQ ID NO: 95048 - protein, 198 aa, Salmonella enterica subsp. enterica serovar Typhimurium; identical to SEQ ID NO: 94112

SEQ ID NO: 95049 - protein, 325 aa, Salmonella enterica subsp. enterica serovar Typhimurium; identical to SEQ ID NO: 93783

SEQ ID NO: 95050 - protein, 198 aa, Salmonella enterica subsp. enterica serovar Typhimurium; identical to SEQ ID NO: 94112

SEQ ID NO: 95051 - protein, 325 aa, Salmonella enterica subsp. enterica serovar Typhimurium; identical to SEQ ID NO: 93783

SEQ ID NO: 95052 - protein, 201 aa, Rhizobium acidisoli
MQLRFWASLVVFIGSYFPLSLILLVQDFKYEVLWAPICWPPNGNTCALPLRNGSLSLSIFVLSLICVFITLGVLSTVRPKTPIRVHEAKYIPAELMSYTLPYVVSFMSLDYRDTGKFVGLLIFLGWMFLITYRSGQLILNPLLAVFGWRLYEVSLSYPGDEKRYPVRAMSKDDLQLPGPADAATIQDVMLIKSKRPKADDS

SEQ ID NO: 95053 - protein, 308 aa, Rhizobium acidisoli
MTTLQDLKALDLAGAQVTLWTIKGPTGPAANAPKFSGRWVETSDEVDDALKATLVSEVAKIEEVLEYSLLAQNNEASALQIPADETHADQLLQEIAAELPGKKATETKHLQNSAFYAAKFVIGEQVVWALRKTEPSWKTKKATSVRNLFFSDQQLAIDDRPHFELGKTFDFIIFSDNILVRNKGAFESILRYKSTQRDDFAELQAEGDFLAVFVSVAPLVEYVGDNKIQLRRACAIKDKGHYRDQAFMQRLRDNQAEYGFNIEFDGGGKIVATVETCPQIMKALLDHRLKSGFSTLVYDVQDTTRVAV

SEQ ID NO: 95054 - protein, 203 aa, Listeria monocytogenes; identical to SEQ ID NO: 94338

SEQ ID NO: 95055 - protein, 313 aa, Listeria monocytogenes; identical to SEQ ID NO: 94339

SEQ ID NO: 95056 - protein, 211 aa, Yersinia enterocolitica; identical to SEQ ID NO: 93800

SEQ ID NO: 95057 - protein, 335 aa, Yersinia enterocolitica; identical to SEQ ID NO: 93801

SEQ ID NO: 95058 - protein, 205 aa, Bacteroides ovatus; identical to SEQ ID NO: 93734

SEQ ID NO: 95059 - protein, 338 aa, Bacteroides ovatus; identical to SEQ ID NO: 93735

SEQ ID NO: 95060 - protein, 197 aa, Enterobacter cloacae; identical to SEQ ID NO: 93954

SEQ ID NO: 95061 - protein, 323 aa, Enterobacter cloacae; identical to SEQ ID NO: 94023

SEQ ID NO: 95062 - protein, 173 aa, Klebsiella pneumoniae subsp. pneumoniae; identical to SEQ ID NO: 94154

SEQ ID NO: 95063 - protein, 289 aa, Klebsiella pneumoniae subsp. pneumoniae
MSLFAMMNKNSAVKVYRIDTDRQTDIKIKKIFDDQLSLFESHHNTELVFEAGYTPSYNECSYIDNFDEGKILLDAVQRSTAMPLWTKNVGLNDITAFFMAPAYPQVKDKIAIQTFSKKQILNESRYLWLSKNSFTMSDLLGFNLDDKLVAILEGDKIKFRNFNNLRSIFDMSSYFAEATKQEISDFVNQPVFNIPVGFDLPALADNVIRKKVTLINKSKILVNHTVTEIKNAALTLNFPIKTTGSGNSEKIEMPTNKKEIKELLNFLDEDYFNSEITKQRFRSNSKRKA

SEQ ID NO: 95064 - protein, 188 aa, Candidatus Methanoperedens sp. BLZ1
MAKQGHPEGMRLARLLMVLSSISPLFILWGIRGNSLIPDNYFLPFCGFMVIVPNLFLWQRIRTARKLKEKRELVVGTAEDHREHLLVYLFAMLLPFYAADLGTYRDLAAAFAALGFIVFLFWHLNLHYMNLLFAVLGYRVFTVNPPADNNPLTGKVSQVLITRRTLVLPGERLIVYGLSDTVTMEVEE

SEQ ID NO: 95065 - protein, 307 aa, Candidatus Methanoperedens sp. BLZ1
MNLNFDISNVTVTEFGVGRDNGDGRDFDRVTVDGNVQNALQEMAEATWVAMQAQTNNPPSYEPSEKHASIEYRHLPLNNNMAETMRNLHQANNLPPDSTALADTEKVFCYFARFTDLQNRKLTAVRRATQFKGVLKSRLLRWDTDALQLIEDRVFKLDNDFDLLIDAENIHILRPSGFEFVGQLQEAIMEAVSTNVTLLKDDIAFLDFDAIENYASRHPRAARYLASIRSKNEALNIDCGCLQKLCADNGVKLTETDGILLLEETEVMGFLEVLDRRRYEIELVADKPEHYRAASRSKIDTGGQDVQ

SEQ ID NO: 95066 - protein, 211 aa, Yersinia enterocolitica
MTSTNSNSASFDNIKFKYYLYFLSLWVLFLSVSIMSFDWVFFERLMKFLSLQYAPDYIVNNAYKLKIRNFVFIFCISMVLFGITSVFYLFSSLSRGWGSTRKVINVKNQTHEHLEFLTTYVMPLVFTDVNSKRTVINLLLMICFIGVIYVRTNRFYANPSLAILGFRLYKCSIKSDSSCKEYTIICRGKLSNGSQVKIKKIDDDTLIAKLI

SEQ ID NO: 95067 - protein, 335 aa, Yersinia enterocolitica
MKAELEEFVQSDGLSGEMFFIIKNNNNYIYRRVVLHDENTEPLITENFKLSIANEILKRIAVDDNGGEIIDNITDMNYENKGIYYFDISDNDKGEVIKTIEEISSLTLADNPVDFKFNDASLDDIVGLVYHISDGDKNIYLYQHRYPNFLHKKSRLSFLGKDDVLVPIPYDMINISKIIDFFIFDGVSYAINIKLLEERYGLTQVIDNMVNEVTPKIIELEIVNKSVLTEPEQLFDDMKEDRGFMRKLARVLKNGILELNVDINIVNEIKDSFPTIGKNIEVVNDKNGIQYIKLTSKSRKKAFIRLLNDEAVRSVLTRKPSIAQNHKPEKNVAPA

SEQ ID NO: 95068 - protein, 199 aa, Clostridium sordellii; identical to SEQ ID NO: 94564

SEQ ID NO: 95069 - protein, 335 aa, Clostridium sordellii; identical to SEQ ID NO: 94565

SEQ ID NO: 95070 - protein, 199 aa, Clostridium sordellii; identical to SEQ ID NO: 94564

SEQ ID NO: 95071 - protein, 335 aa, Clostridium sordellii; identical to SEQ ID NO: 94565

SEQ ID NO: 95072 - protein, 199 aa, Clostridium sordellii; identical to SEQ ID NO: 94564

SEQ ID NO: 95073 - protein, 335 aa, Clostridium sordellii; identical to SEQ ID NO: 94565

SEQ ID NO: 95074 - protein, 199 aa, Clostridium sordellii; identical to SEQ ID NO: 94564

SEQ ID NO: 95075 - protein, 335 aa, Clostridium sordellii; identical to SEQ ID NO: 94565

SEQ ID NO: 95076 - protein, 207 aa, Enterobacter cloacae
MSSSSEELKIGARLTLFLVSYMPLFLIMTVNQVYKKKDFLHWGGMNKKALLLFVENFGAVTVILMFVLFGFIGLYFLLNNINSRIDNDGVFVKIVDIENKNSESISYLFTYLLPFLFQDLSDLTSVFSLAVLLLVTFIIYSNSSMILINPTLAIKYSLYSIEYTKENGPKKKGMIICRDKYLDEGDCIKIQKIGYKLFYAKAQEKKQ

SEQ ID NO: 95077 - protein, 339 aa, Enterobacter cloacae
MNNTDIKDILNSLLKVYQSNTFSMNCFLITRKVKKDSEISSQERFEFNLYKVSLDKDMVNFFKTGTSDTISKIVKNNNLEFSNYSVISDDGIDAVYGYEGMENLDFNHVLDGVNTDTKFEVLKDLKEIKDDILAFCLKVSTQDDSFLLFRKLTKSKVATDAPLNKMQRVQAFFDVNLSKMKVVPMQTVSFDSKVDFFFINKKVYIISKLGFEQIIGIEREFMENAKSVLQVLSNACVIDNMQLLEQVILSNKSLLRTVANIAQKKNHESLDAATISKYQDTLKLFEDNILEEKNGRLVINNVDEAKLLIRLLNDFYKQGVASGKYYGTNSGHIIDKKVN

SEQ ID NO: 95078 - protein, 193 aa, Pseudomonas amygdali pv. photiniae; identical to SEQ ID NO: 93722

SEQ ID NO: 95079 - protein, 304 aa, Pseudomonas amygdali pv. photiniae
MQVHFDIFRDFNYIDSTVHLWIFKKSTTDRKFNAAYVQTDETVNTLLKNVLIHEVNRTTEFAQYSYLAQTNDNSCLAAPALATNFSLLKVQVDRPEPECAVNSVDDLKGAQGYVVKFTHNGQTLYAVKRSTASWKTSYPNKFINMVFSNGELSAAEDNGFTIEKNFDFYCSVDTLLITAKRAFESLMQYKEAYTQAFTELQADPDFSNLFADITPLVEYIGTNSTQLRRMATIEQKSLYSNPGFMNSLKQVNALRNWGLNFDQTNDKIIVCSATAPTILQVLLDHRLMSEVTSNIYDVPDAIQI

SEQ ID NO: 95080 - protein, 193 aa, Pseudomonas amygdali pv. eriobotryae; identical to SEQ ID NO: 93722

SEQ ID NO: 95081 - protein, 191 aa, Pseudomonas amygdali pv. eriobotryae
MVKFTHNGQTLYAVKRSTASWKTSYPNKFINMVFSNGELSAAEDNGFTIEKNFDFYCSVDTLLITAKRAFESLMQYKEAYTQAFTELQADPDFSNLFADITPLVEYIGTNSTQLRRMATIEQKSLYSNPGFMNSLKQVNALRNWGLNFDHTNDKIIVCSATAPTILQVLLDHRLMSEVTSNIYDVPDAIQI

SEQ ID NO: 95082 - protein, 193 aa, Pseudomonas amygdali pv. lachrymans
MQFRLSAAFLIFIGSYTPLAIILAIQNIPFEWWSRPICELPKLLAFTCATNPFKNPLLAILMVALTVSSAFLASQLFKRIAFPHRIEVLSVKAVPNEIINYTFPYVVSFMGISYSEPEKLLGFLVFLLWMFAITYKSGQIIMNPLLLIFGWNLYEANIQINGVSRVVKILKRVSFPPGNYKAQTVQDFYICKE

SEQ ID NO: 95083 - protein, 304 aa, Pseudomonas amygdali pv. lachrymans
MQVHFDSFRNFNYIDSTVHLWIFKKSTTDRKFNTAYVQTDEAVNTQLKNVLIHEVNRTTEFAQYSYLAQTNENSCLSTPALATNFSLLKVQVDRPEPECAVKSVAELKGAQGYVVKFTHNGQTLYAVKRSTASWKTSYPKKFINMVFRNGELSAAEDNGFTIEKNFDFYCSADTLLITAKRAFESLMQYKEAYKQAFTTLQANVDFSNLFADIAPLVEYIGTNSTQLRRMATIEQKSLYSNPGFMTSLKQVNALRNWGMNFDQTNDKIIVCSATAPTILQVLLDHRLMSEVTSNIYDVPDAIKI

SEQ ID NO: 95084 - protein, 138 aa, Pseudomonas meliae
MQFRLSAAFLIFIGSYTPLAIILAIQNIPFEWWSRPICELPKLLALTCAINPFRNPSLAILMVAFTVSSAFLASQLFKRIAFPYRIEVVSVKAVPNEIINYTFPYVVSFMGISYSEPEKLTGFLVFLLWMFAITYKSG

SEQ ID NO: 95085 - protein, 255 aa, Pseudomonas meliae
MLIHEVNRTTEFAQYSYLAQTNDNSCLAAPALATNFSLLKVQVDRPEPECAVNSVDDLKGAQGYVVKFTHNGQTLYAVKRSTASWKTSYPNKFINMVFSNGELSAAEDNGFTIEKNFDFYCSVDTLLITAKRAFESLMQYKEAYTQAFTELQADPDFSNLFADITPLVEYIGTNSTQLRRMATIEQKSLYSNPGFMNSLKQVNALRNWGLNFDQTNDKIIVCSATAPTILQVLLDHRLMSEVTSNIYDVPDAIQI

SEQ ID NO: 95086 - protein, 193 aa, Pseudomonas savastanoi pv. nerii; identical to SEQ ID NO: 93722

SEQ ID NO: 95087 - protein, 304 aa, Pseudomonas savastanoi pv. nerii
MQVHFDIFRNFNYIDSTVHLWIFKKSTTDRKFNAAYVQTDEAVNTLLKNVLIHEVNRTTEFAQYSYLAQTNDNSCLAAPALATNFSLLKVQVDRPEPECAVNSVDDLKGTQGYVVKFTHNGQTLYAVKRSTASWKTSYPNKFINMVFSNGELTAAEDNGFTIEKNFDFYCSVDTLLITAKRAFESLMQYKEAYTQAFTELQADPDFSNLFADITPLVEYIGTNSTQLRRMATIEQKSLYSNPGFMNSLKQVNALRNWGLNFDQTNDKIIVCSATAPTILQVLLDHRLMSEVTSNIYDVPDAIQI

SEQ ID NO: 95088 - protein, 193 aa, Pseudomonas syringae pv. helianthi; identical to SEQ ID NO: 93722

SEQ ID NO: 95089 - protein, 304 aa, Pseudomonas syringae pv. helianthi
MQVHFDIFRNFNYIDSTVHLWIFKKSTTDRKFNAAYVQTDETVNTLLKNVLIHEVNRTTEFAQYSYLAQTNDNSCLAAPALATNFSLLKVQVDRPEPECAVNSVDDLKGAQGYVVKFTHNGQTLYAVKRSTASWKTSYPNKFINMVFSNGELSAAEDNGFTIEKNFDFYCSVDTLLITAKRAFESLMQYKEAYTQAFTELQADPDFSNLFADITPLVEYIGTNSTQLRRMATIEQKSLYSNPGFMNSLKQVNALRNWGLNFDQTNDKIIVCSATAPTILQVLLDHRLMSEVTSNIYDVPDAIQI

SEQ ID NO: 95090 - protein, 193 aa, Pseudomonas coronafaciens pv. porri; identical to SEQ ID NO: 93722

SEQ ID NO: 95091 - protein, 304 aa, Pseudomonas coronafaciens pv. porri; identical to SEQ ID NO: 95007

SEQ ID NO: 95092 - protein, 193 aa, Pseudomonas amygdali pv. tabaci; identical to SEQ ID NO: 95082

SEQ ID NO: 95093 - protein, 304 aa, Pseudomonas amygdali pv. tabaci; identical to SEQ ID NO: 95083

SEQ ID NO: 95094 - protein, 193 aa, Pseudoalteromonas sp. P1-13-1a
MQFKLIAGFIIFLGSYLPLALILAVQDIPISWWRNSFCDFSNIENCSFNPFTHPYFSIVFIVVTIISVIVSNISLKKIDYPFDGEVKSSKTIPNDIINYVFPYVVSFMGISYDAPEKLLGFIVFLLWMFAITYKSGQIIMNPLLLMFGWKLYEAKIEINGQARDVRVLKKGTLPPGSYKFQSVQDFYISREIN

SEQ ID NO: 95095 - protein, 304 aa, Pseudoalteromonas sp. P1-13-1a
MDAEFQLLKAFDFTNSTPHLWVFKDSRSQEKFRTFYVQTETDLNRQFKTFVNKEIERITEHSPYSYIAQTNENSCLTLDSTTTNFSNLKVLVDRLETEHRLDDSKDLKGANGYVVKYISNGVTVYAVKRSTTSWKTSYSRKYINMVFSNGELSGVEDSSFVIEKNFDFYVINNVAFIANKRGFESSMKYREAYSQAFTQLQENPSFSNLFSDLEPIVEYVGTNSMQLRRMGVVEEKGIYTSPNFIANLMTVNTARGWGLNFDEENNTIIPCAETTSTILQVLLDHRLMSEITANIYDVPDAVQV

SEQ ID NO: 95096 - protein, 118 aa, Rhodobacter capsulatus
MRSRRAPAAERHRITTVEPADRENMAIMLLYLLPLFTADFGKLNWIMWVPTIAIFAFIAVTSHSYFFNPLLGAFGWHFYRVGTPQNVTSILITKRTIRKGDQTINGIELGDYVILETE

SEQ ID NO: 95097 - protein, 268 aa, Rhodobacter capsulatus
MEDGVQGDVERIFDEQEQSFFLGKDEPIEFNGDWKPDENQLLCITDRDLLAQMNETLAIGAGAYDRLDISSYDTAGVKALFMHSEQIKGHILLQKFRTSQYLQRKGLTLAFNGNQFGKLSERGFSLDERLGAVVDGDTVMFVSFHVLRSILTVQEHFAEATAQEVDEFAQHASFHIENRAVFDSHMDERCRKLIRGISKSRVLVDHNAAEIIARAKTVGLTLVEDGGRIVLPSVKRDLKTVLSFLEESVYKGVFSEETFLTNSKRPLA

SEQ ID NO: 95098 - protein, 118 aa, Rhodobacter capsulatus; identical to SEQ ID NO: 95096

SEQ ID NO: 95099 - protein, 268 aa, Rhodobacter capsulatus; identical to SEQ ID NO: 95097

SEQ ID NO: 95100 - protein, 201 aa, Leuconostoc lactis
MSGWMKWSMYVMSYLPLYILILLQNMTDFINMLKNISQSKYSFHDNALEFFVFWFIIILVLWALITWKNIYSNKVSRNTKIGTYEDAGEGTLNYLATFIVPLISLKINDGNTMIANLFLFILLGKLYTMGDLLYLNPVFTIFGFHILRDKNTKKIMLSKYSISQLHEAGKSNLNQITVSILGSSEINIIKEIVNQEFENDE

SEQ ID NO: 95101 - protein, 331 aa, Leuconostoc lactis
MAIVKDIFDKTQAISGSKSHGNVTLYLMRYRQKTIKAEKNSKVITFPSFYDAKLDNDLQEEFVKLFLNSSSYYSDLTYDYSVNGSQEDGVAVVHENDFENVTKFIGDLKQGSNVLDDMSQLNLARIKAYIVRLSFGNDDDLYFFGSIKNYSQLQKKSVVLHKSINKSKLKKFDMNDTIGFDFYVNMFWYDNDLYIANANKFESVFQMSRYYKEKAEEVLNTIVKSDCVMDDDIIAINNKCKDDSRIAKKVMKLKFREDRIKSIYENLNQDIFDEITNDSVLKDKYELVKYENGKLTMVDNSDLKNIHEYLNFIADTAKRGIASKQTSSENF

SEQ ID NO: 95102 - protein, 195 aa, Escherichia coli; identical to SEQ ID NO: 93788

SEQ ID NO: 95103 - protein, 319 aa, Escherichia coli
MTPVNFKNQITEIFDNFSGIRIIFIVKTEDNYELKLSKIDAEALPKIVEGFKIRLYDDIVTNEDLTIPLLSNFDDRKNALFAFDYEEHPKEFDFIKNAIAIPPNSQDYYDLNNKFTDVKGIIIQLRGNNKCLSLYKNKTNLMVFEQSRKLFNLIPDADGYLKELPTQVFRLDYNYDLALIDDEFLIKNQKTLEITMQFHQVIEVQATVALEALKASLLIEDLTHLEKSAKEISFSRKLAKIAKHSPVLGKIDVPEIIDYVSKHTYLSTVLIVSEDGTQLLVKTKESQKHFIKLLSDDYLESPLTKILYDSLAKDELKAH

SEQ ID NO: 95104 - protein, 211 aa, Escherichia coli; identical to SEQ ID NO: 93894

SEQ ID NO: 95105 - protein, 335 aa, Escherichia coli; identical to SEQ ID NO: 93895

SEQ ID NO: 95106 - protein, 197 aa, Escherichia coli; identical to SEQ ID NO: 93954

SEQ ID NO: 95107 - protein, 323 aa, Escherichia coli; identical to SEQ ID NO: 93955

SEQ ID NO: 95108 - protein, 202 aa, Methylobacterium sp. Leaf88
MQLRILVAVAIYLGSYLPLGVILLAQDIDVEAVRRGTCPMASMVALECASPLKNPIWSLSAVAICATGMAVTFLALRLVRTPHRVRVTESKHIPADLINYVIPYVVSFISLEYDQPLKLIGFAVFLIWIFWITYRSGQIVLNPVLAAFGWKLFEVKYIYDGGSNTYVGRMLSKVDVEPERSYHQGGLQDVMIVRDDGGDDRG

SEQ ID NO: 95109 - protein, 306 aa, Methylobacterium sp. Leaf88
MTTLADLKAFDLASAGVSIWLFKTAPGGDGHPRYSGRWVGITDDLATRLRGAVGTCLEPIAETIEYDILAQNNEGSALTLQADETHAHLISAAVADPTPARKVRGIRDLANSVFCVAKFVHEGKTLLAVRKTDASWSTRRTTGVIKMFFNDEELDLEEKPGFSIRPDFDFFILDDRVFVRSKPHFESVLSYKAGHEVAFARLKKEPDFVGIFSELGPLDEYVGTNKIHLRRAVAIQQKGHYKDAEFMRRLLAEHARMNLSITFDDAGRIVPTVESGRDIFQALLNHRLDSRLTLEIFDVPSTERVG

SEQ ID NO: 95110 - protein, 200 aa, Rhizobium sp. Leaf306
MQFRFIASLIVFLGSYFPLSLILLAQDYRYELAIAPFCWPIDAAKCVFPFKNGTLPLILFGVCLACLLLSLLGLTTIKPKVPVDIQEVKYVPSEFMAYTLPYVVSFMSLEYQDTGKLVGLVIFLGWMFVITHRSGQLVLNPLLIVFGWRLYEVTYFYPGNDQTRTGWALSKDNIEPNTRTDVATVQDTMIIKARTIKVSG

SEQ ID NO: 95111 - protein, 308 aa, Rhizobium sp. Leaf306
MAALEDLKALDLAQAQVTLWTVKGPTGPAADTPKYSGRWIDTTDQVDDVLKEILIGDLAKTEEVLEYGLLAQNNEASALTIGFDETHADQLLDEIAAELPQKKASAVKHLLNAKFYVAKFIIGTQVIYAVRKTEDGWKTKRALNVRDLYFADQQLALDDRPHFQLSKNFDFFIFGGEILVKTKNAFESFLRYKSDQRQEFVGLQAEPEFLDIFLDVAPLVAYVGDNKIQLRRAFAIRDKGHYKDPLFMQRLRDNQAEYGFEIQFDPQGKIVATPETCAQIMKALLDHRLKSGFSTLIYDVQDTTPVQV

SEQ ID NO: 95112 - protein, 195 aa, Exiguobacterium sp. Leaf187
MTLFMKWGMFILSYIPLYFLLAIQHLKYKKIPLSVSELSSAWSENRVQFCFWLVLIMLFLVSIFMLIMFIRIFAKGGNSFKPDFTLKDVTNLQDNQMSYLLTYVVPLASINEISDGRSLLTNLFLFILIGKMYTQNNLIYVNPAFSIVGFSVFQANNKVYISRISREKLKLILIHEEQIYLRELGSDMYYLSVKD

SEQ ID NO: 95113 - protein, 306 aa, Exiguobacterium sp. Leaf187
MDINGIIEFIDRAEMSFYLVEKKARKNKPPTYAVYTPNISEIKQDIVSMFRSHIIENQIYQNEQVPFDTVVAEDDRLEFCIAGSTPHDAIEALIENSIENRGNHIDFSAPNVDINKLSFYCTKFEVEEEEPLYLIRRVNKLSALNRGFKALFSDNSFSKLNDQVFAIDPMNDLIIQNEEALILSRFALNVLCTIDDFYIDATKQLLESVKSHFSNYDAFLEDCLQNRRILRKMVKMSENPERISLVLDEGRAAIESVIEDHALTVTLNEDGLINYSGDATEMTEIANLLSDAYFRSSILNEKGISR

SEQ ID NO: 95114 - protein, 190 aa, Flavobacterium sp. Leaf359
MKPKLLTAILLFISAYSPLFLILAVKDFDFNCSYHFKHPIAIYTMLGIALLSVILLFVTVASTKRGNMPVKIKSVKNRSVDLINYTIPYIVSFFSFDLSKIEDMISLSIFLLLMLLLTIKSKSVFMNPILLLAGYNLYDLEYEFDGKTCSTIVISKEEMYADERFYIRSLTRFLYIVIEKKNNANDETEI

SEQ ID NO: 95115 - protein, 313 aa, Flavobacterium sp. Leaf359
MLMMRQKFKALKDLDLQNADVSLAIVKEYKKNRESKYMVNYVQINPNLETRLRNIVTRKINSANTFEDYTFDCPEPEEDQVRAINYEETDFYRIFEQLQDLNPEEDIIENIEELVKAKAYLIILRNEEGIQVVGFKTLPENWKMKRDRGLIPLLYRENRFEDLEEENVFSISSFVDLIYFNEALFILSKKNFESGLNFRNGMLAKADELYQEVREINLFVNIEILTNRVGNNQRYLRKIATIKNLGYYQNNDYLQRLRLISQQRNWGIEFQEGQIVITEETLDAVLTLLQNKRLHSELTDETFDVDSAKRLEM

SEQ ID NO: 95116 - protein, 190 aa, Methylophilus sp. Leaf416
MQLHFLSALAIFISGYAPLGLILIIKDLNEDTLYFEHPMRALTILVIFALSALFALSAARNIRQGVPVKISKVSNKSGDMFTYTIPYMMSFYKFDLGDWKLLLCLFIFLSLMFVLSYRTQNVFVNPVLALAGYGLYDCQFKDGTQERQGLLLSKQHFQIGDYCAIKRLSNLMYFVTHVEVTKEAGEGVSQ

SEQ ID NO: 95117 - protein, 311 aa, Methylophilus sp. Leaf416
MTTNVKNTLQALRASDFKHWVTTFWLVKRKLSQQQAKYSVLKVDTDAKLEQKLKNAVTEKILDQDYQLDDYDFLTADQDKSLLTIASSETDVTLIQAEIEKGTANAKVEQYEQLLDSWAMVIKLEHQDKAIYAYRKINKFNHAARLSHVSFIQFKDQELKDLDEKEIFTIDTQVDFFTYDGTTFIANKKEFEKTLNFRAGMEKNRDVVLKEFVDLNIFNDASLLKEHIGANLNYLRKVSSIQKSGYYKDATFMEELVKVNQLKNWGLQVENGAIVINEASIDLVLTLLNNGRLESPINHEMFDAAVKKKVT

SEQ ID NO: 95118 - protein, 190 aa, Methylophilus sp. Leaf414
MQLHFLSALAIFISGYAPLGLILIIKDLNEDTLHFEHPMRALAIFVIFALSALFALSAARNIRQGVPVKISKVSNKSGDMFTYTIPYMMSFYKFDLGDWKLLLCLFIFLSLMFVLSYRTQNVFVNPVLALAGYGLYDCQFKDGTQERQGLLLSKQHFQVGDYCAIKRLSNLMYFVTHVEVTKEAGEGESQ

SEQ ID NO: 95119 - protein, 311 aa, Methylophilus sp. Leaf414
MTTNVKHSLQALRASDFKHWVTTFWLVKRKLSQQQAKYSVLKVDTDTKLEQKLKNAVTEKILDQDYQLDEYDFLTADQDKSLLTIASSETDVTLIQAEIEKGTANAKVEQYEQLLDSWAMVIKLEHQDKAIYAYRKINKFNHAARLSHVSFIQFKDQELKDLDEKEIFTIDTQVDFFTYDGTTFIANKKEFEKTLNFRAGMEKNRDVVLKEFVDLNIFNDASLLKEHIGANLNYLRKVSSIQKSGYYKDATFMEELVKVNQLKNWGLQVENGAIVINEASIDLVLTLLNNGRLESPINHEMFDAAVKKKVT

SEQ ID NO: 95120 - protein, 190 aa, Methylophilus sp. Leaf459; identical to SEQ ID NO: 95116

SEQ ID NO: 95121 - protein, 311 aa, Methylophilus sp. Leaf459; identical to SEQ ID NO: 95117

SEQ ID NO: 95122 - protein, 193 aa, Lactobacillus salivarius DSM 20555 = ATCC 11741; identical to SEQ ID NO: 93752

SEQ ID NO: 95123 - protein, 320 aa, Lactobacillus salivarius DSM 20555 = ATCC 11741; identical to SEQ ID NO: 93753

SEQ ID NO: 95124 - protein, 200 aa, Lactobacillus plantarum
MTRNSAKTNCVKWSIFISSYIPLYFFILIITSDKLFRLFRSKKNWCEYGRYLLKNSGELLFIIVLVLVIIYSFWTVRQILNASATNHNIIVCDVKSSQDTIISYIATYLLPLTTLDNGNIRLIIANVGLFLVIGFLYVKLNLIYLNPTFLFFGYVPYFSKSKIIISNVSYEKLRNNEHEKKWNGAYIANGIVVIRKEDNE

SEQ ID NO: 95125 - protein, 308 aa, Lactobacillus plantarum
MDLNKVLAILRDQTTNIDLYFTEKCHDRYNTMVAGIADNADGDQLKNIMKDLVDRNVTAINADGLEEVAYNPTGYREGTVESVPDDYIRESYNEVIESFENPENEGLEDSADNLTFYTMLFTRDNDVVRIMRRVSKFKRFYSKGIIAAFHGNELNRIQDKMIGLDGSVDIIDYDGEVLILNHIALERIFRLDEKFESSARTILNSLSHNKKIGNFNNLEEDCLNDKRMQRTLTKMADEGIDWQHCLDHFENVVNIIDTFELEIDVIQTPEQMLMYDDKSQLMAFIRLIRDAYYKTMINERNGIDQHIG

SEQ ID NO: 95126 - protein, 194 aa, Peptoclostridium difficile; identical to SEQ ID NO: 94554

SEQ ID NO: 95127 - protein, 307 aa, Peptoclostridium difficile; identical to SEQ ID NO: 94555

SEQ ID NO: 95128 - protein, 198 aa, Salmonella enterica; identical to SEQ ID NO: 94112
  subsp. enterica serovar Hadar str. SA20026260

SEQ ID NO: 95129 - protein, 325 aa, Salmonella enterica; identical to SEQ ID NO: 93783
  subsp. enterica serovar Hadar str. SA20026260

SEQ ID NO: 95130 - protein, 191 aa, Pseudomonas aeruginosa
MSDPSLRLRPLVSLLLFLSAYSPLMVILAIKDLDLSSPWFFHTPINSGILLLMAVGSSVITLRAVKEIDGGLPVVITKAANKSGDMFGYTIPYMLSFMRIDLGDWQTLLSLTVFLSVLFIMAYRTQTVFINPILAIAGYMLIDCTFKRAEKETQAMVITRVPISIGDSCQLERLSHYLYIAAQPEPKQSGG

SEQ ID NO: 95131 - protein, 317 aa, Pseudomonas aeruginosa
MSTNKAKKQLKEIKSFDFSKWSVTFWLVKRKVVQKDANYSMLRVNIDAKLQRRFRGYLRAQLQNKEFHVSEYDFNNADGDDALFTISTDITDFVKVAAAIDDGFNNPHAKTYEELLNSWAYIALFEKDGKRLFAWRKINADTQPKKVKSKSATFFQDHKLVDLDDKEIFLIDPRYDFFVYEGTTFIANKRQFESSMNFREGMKANGDEVLADFEKLKIFDNVGIIKEFVGTNLHHLRKLSSIRKSGYYKQPDYMQKLIRVNTSEKWELKIVKGKIVVEKETVELLLKLLNNDRLRSPINNELFDSAAKAPVATGGAA

SEQ ID NO: 95132 - protein, 191 aa, Pseudomonas aeruginosa; identical to SEQ ID NO: 95130

SEQ ID NO: 95133 - protein, 317 aa, Pseudomonas aeruginosa; identical to SEQ ID NO: 95131

SEQ ID NO: 95134 - protein, 169 aa, Aeromonas hydrophila; identical to SEQ ID NO: 94018

SEQ ID NO: 95135 - protein, 295 aa, Aeromonas hydrophila; identical to SEQ ID NO: 94019

SEQ ID NO: 95136 - protein, 171 aa, Klebsiella pneumoniae; identical to SEQ ID NO: 94748

SEQ ID NO: 95137 - protein, 297 aa, Klebsiella pneumoniae; identical to SEQ ID NO: 93759

SEQ ID NO: 95138 - protein, 171 aa, Klebsiella pneumoniae; identical to SEQ ID NO: 94748

SEQ ID NO: 95139 - protein, 297 aa, Klebsiella pneumoniae; identical to SEQ ID NO: 93759

SEQ ID NO: 95140 - protein, 100 aa, Lactococcus lactis subsp. lactis
MGYIVTYIVPLLSMNINSARSLVINLLLFIIIGTFYVKNDQIFMNPIYNLFGYNIFSAESGIYITKISKQKLKLLAKNNEKVRKTNILGDIYVLKQNKER

SEQ ID NO: 95141 - protein, 304 aa, Lactococcus lactis subsp. lactis
MNIGNVREFLAGINPNDMDNIDMRMIQKMGEGVASFAPQLSVDMKQELKDFYCEVLNNSFFDIRQAEYNPNIAMEGTLQVSNLDTAHIREVINDIESEDNYVGDMEEVDLNNLNYYSFKFTQDNESLYIFRRFTKMKKIRNGILGIFQDNSFKKLESKNFFGIDRDIDIIIFEDQVLIVNRFALQTIFKLNDYFTERTMLALEKLDQGEVIENFNDFQTDCINDKMAARRMTKIINTPRRIEDFLQHIDQLPNVIQQFDLEIELSEENKIKYNGTKEARSQILYCISDAYYQSFILQRLGEDPS

SEQ ID NO: 95142 - protein, 196 aa, Lactococcus lactis subsp. lactis
MRTIQKIVFYMSSFMPLYLLLIVQNFHFGDKKSWFSLSVIRKQFDFSNKPVSIFWWFLIILILISLFGCFIFFKVYTSKEGNLADISDAEFVREDTMGYIVTYIVPLLSMNINSARSLVINLLLFIIIGTFYVKNDQIFMNPIYNLFGYNIFSAESGIYITKISKQKLKLLAKNNEKVRRTNILGDIYVLKQNKER

SEQ ID NO: 95143 - protein, 304 aa, Lactococcus lactis subsp. lactis
MNIGNVREFLASINPNDLDNIDMRMIQKMGEGVASFAPQLSVNMKQELKDFYCEVLNNSFFDIKQAEYNPNIVMEGTLQVSSLDTAHIREVINDIESEDNYVGDMEEVDLNNLNYYSFKFTQDNQSLYIFRRFTKMKKIRNGILGIFQDNSFKKLEAKKFFGIDRDIDIIIFEDQVLIVNRFALQTIFKLNDYFIERTTLALEKLDQGEVIENFNDFQKDCINDKMAARRMTKIINTPRRIEDFLEHIDQLPTVIQQFDLEIELSEENKIKYNGTKEARSQILYCISDAYYQSFILQRLGEDPS

SEQ ID NO: 95144 - protein, 233 aa, Bacillus sp. SGD-V-76
MGDKVEFMINRVFRYMLFLSSYLPLFIILFLMNINNLVLCLFIWLIMSITLLTLKLYLEKPLKASPNFRIKLVMINSKGSEALNYIVTYIIPFISFNSNITNSDGDFNIPTIFAFIVLFLVIGYLYMHNNLYHINPILSLFYDINITQGENGENLIVVSEKGKDVPLNSTIYTRNLSPGAVMFVDDSKSRLSYKKVVIFLGSFLVFLALWNEQMNDYLFKAIEFINTTIKNLI

SEQ ID NO: 95145 - protein, 325 aa, Bacillus sp. SGD-V-76
METNFKVLQDIFVNCTENYSINGLSAFLLSDEEEPFKLYKLNMSTHEDLRTIICKNLENAIDAQLFEYHNNTSPDGNESVSCLKKGEVPNFLDIEQLIIEDNSTGLTKKVFEESSSSMKGYVIDVIVTNNNTTKEFHVQIFSTLSKSNFYKPKKSLYSFGNEDGDLLQKVEVSHLELNEKCCAFSIDDEIFVTHGFFFERLFKYEEHINMHSEAILGSINGSGLIDNFLVLESHCNRNKNFKKKLFTISSASKFENVTFETFKKVKEAIHEGLFFSLDSEKETISIDEENSYKSVDQIIRIINDEAAETLVSETRIFANQRINIG

SEQ ID NO: 95146 - protein, 197 aa, Klebsiella pneumoniae; identical to SEQ ID NO: 94106

SEQ ID NO: 95147 - protein, 323 aa, Klebsiella pneumoniae; identical to SEQ ID NO: 94107

SEQ ID NO: 95148 - protein, 171 aa, Klebsiella pneumoniae; identical to SEQ ID NO: 94748

SEQ ID NO: 95149 - protein, 297 aa, Klebsiella pneumoniae; identical to SEQ ID NO: 93759

SEQ ID NO: 95150 - protein, 171 aa, Proteus mirabilis
MNKLARLLLTASSIAPVCITLAFIGFIKDSMWLVYSSVTVCVLSFFSCVFFIHIAKQRLCELTKNIDSISPANKEVTNYFISYLFPLLGTDSISTDWKYALFFYASLLFYISFSENYNFNPLLSVMGYKFYEAEDDTGVGFVLISKDVILDIKNKKFTVVQLTDYTYLHVG

SEQ ID NO: 95151 - protein, 292 aa, Proteus mirabilis
MPLFALMDKDVAIPIVRIVTDKATDKKVTEIFQQQFEYFKSHYDQEIEFYAGYSPRYNECFFLDDFDEALPLIDAINRNTAIPKLDHKKIPMSGIKCLFVCTAFPNSPDKIAIQSFNKGQILNIDRSLWLSKKTFSMMDGVGFNLDDKLVAVIEGKTIKFKSFQRLRSIFDMEKYFSEATDDDVKSFSQHCKFKTEVGFDLLSVADTVVRTKITLINNSGVLDIDLKKLKSAAKKVKFDLKTTTDASGVEVIAMPTTKKEIKNLLTFLDEDYFTSEISKTIYRSNSKRPVNK

SEQ ID NO: 95152 - protein, 171 aa, Klebsiella pneumoniae; identical to SEQ ID NO: 94748

SEQ ID NO: 95153 - protein, 297 aa, Klebsiella pneumoniae; identical to SEQ ID NO: 93759

SEQ ID NO: 95154 - protein, 196 aa, Klebsiella pneumoniae; identical to SEQ ID NO: 94270

SEQ ID NO: 95155 - protein, 319 aa, Klebsiella pneumoniae; identical to SEQ ID NO: 93875

SEQ ID NO: 95156 - protein, 198 aa, Salmonella enterica subsp. enterica serovar Typhimurium; identical to SEQ ID NO: 94112

SEQ ID NO: 95157 - protein, 325 aa, Salmonella enterica subsp. enterica serovar Typhimurium; identical to SEQ ID NO: 93783

SEQ ID NO: 95158 - protein, 172 aa, Pseudoalteromonas sp. 10-33
MTKLAKLFLVLTSTAPILLTLAFVEFLTKKNWSIIIPLVVVVLLFTVFCFYVLNQAPKKLEVFNINSISIKPADNEIVGFVLAYLVPILNASYNEVNFALMGFIYLLFVVIAWNSNAYHFNPLLGVLGYNAYEVTTKENITYVLLTRKTIRKNADVNSVCQLTQYMLLDIRK

SEQ ID NO: 95159 - protein, 292 aa, Pseudoalteromonas sp. 10-33
MTTRNNFFVLVKDGNEIEVKRIALGNELQVELTTMFSHQEAEFLNNDTQVIPFDGQYKPEHDEVLAIGGFDLPQVFKDAIDSPMTLEPLHFNEETNSKIVAVFCGSNDGDEGYTVLVQLFEGTRLIKPNMMNIVFGANDEFQKLEYYGMTLDSKLIALYKDNQLHFKSYHFTRRVFDLSNHYREATNQEVLALASHQHFTAIEEEAFLLMADHVVRQTIARIQRNDVLETFSVQDLSAKANEVNFDIEVSDGEIVLPNVKKELKLVLSFLDDQMFLGPITGQTRVSNSSRVI

SEQ ID NO: 95160 - protein, 197 aa, Enterobacter asburiae; identical to SEQ ID NO: 94106

SEQ ID NO: 95161 - protein, 323 aa, Enterobacter asburiae; identical to SEQ ID NO: 94107

SEQ ID NO: 95162 - protein, 172 aa, Enterobacter hormaechei subsp. oharae; identical to SEQ ID NO: 94728

SEQ ID NO: 95163 - protein, 297 aa, Enterobacter hormaechei subsp. oharae; identical to SEQ ID NO: 94045

SEQ ID NO: 95164 - protein, 200 aa, Enterobacter hormaechei subsp. steigerwaltii; identical to SEQ ID NO: 94218

SEQ ID NO: 95165 - protein, 318 aa, Enterobacter hormaechei subsp. steigerwaltii; identical to SEQ ID NO: 94219

SEQ ID NO: 95166 - protein, 200 aa, Enterobacter cloacae; identical to SEQ ID NO: 94160

SEQ ID NO: 95167 - protein, 304 aa, Enterobacter cloacae; identical to SEQ ID NO: 94161

SEQ ID NO: 95168 - protein, 211 aa, Enterobacter hormaechei subsp. oharae
MYLLSMLFLFIPITIYFSGIDNVWSVLDKAMSSCSGADGKFQCVLDYSNSRLTFSVLRSVICGALILTCSYTYIWYRWVLKNLDSGAVSRKLKVVSCKKESGEYLSFLSTYIMPLVFTDLSKPSNIVNFLFVLIIVGFLHIKTKRIHCNPTLSLFNVSAYKITYSVVANGREKTQDGELIVLSKDLIKENDFIRVINHDDYLTFAKKIIEE

SEQ ID NO: 95169 - protein, 380 aa, Enterobacter hormaechei subsp. oharae; identical to SEQ ID NO: 93935

SEQ ID NO: 95170 - protein, 171 aa, Enterobacter asburiae; identical to SEQ ID NO: 94748

SEQ ID NO: 95171 - protein, 297 aa, Enterobacter asburiae; identical to SEQ ID NO: 93759

SEQ ID NO: 95172 - protein, 211 aa, Enterobacter hormaechei subsp. oharae; identical to SEQ ID NO: 95168

SEQ ID NO: 95173 - protein, 380 aa, Enterobacter hormaechei subsp. oharae; identical to SEQ ID NO: 93935

SEQ ID NO: 95174 - protein, 200 aa, Enterobacter cloacae; identical to SEQ ID NO: 94160

SEQ ID NO: 95175 - protein, 304 aa, Enterobacter cloacae; identical to SEQ ID NO: 94161

SEQ ID NO: 95176 - protein, 198 aa, Salmonella enterica; identical to SEQ ID NO: 94112

SEQ ID NO: 95177 - protein, 325 aa, Salmonella enterica; identical to SEQ ID NO: 93783

SEQ ID NO: 95178 - protein, 198 aa, Salmonella enterica; identical to SEQ ID NO: 94112

SEQ ID NO: 95179 - protein, 325 aa, Salmonella enterica; identical to SEQ ID NO: 93783

SEQ ID NO: 95180 - protein, 201 aa, Salmonella enterica
IFYFSGIDDVWNVFTKANGFCDGVSNRIVCITGNMGNQLSLSVSRLCVCIFLVFLCGYTYWWYKRQLSFLDRGITSAEVVVVGCEKESTEYLSFLSTYIMPLVFTDLTKPSNVFNFIFILVIVGFLHIKTRRIHSNPTLSLFGVSAYKIDYIIRVDGQDSDITKGLIVLSKDEISVKSVIRIIKKEDYITFAKYIRNDSNG

SEQ ID NO: 95181 - protein, 381 aa, Salmonella enterica; identical to SEQ ID NO: 94125

SEQ ID NO: 95182 - protein, 198 aa, Salmonella enterica; identical to SEQ ID NO: 94112

SEQ ID NO: 95183 - protein, 325 aa, Salmonella enterica; identical to SEQ ID NO: 93783

SEQ ID NO: 95184 - protein, 141 aa, Salmonella enterica
WWYKRQLSFLDRGITSAEVVVVGCEKESTEYLSFLSTYIMPLVFTDLTKPSNVFNFIFILVIVGFLHIKTRRIHSNPTLSLFGVSAYKIDYIIRVDGQDSDITKGLIVLSKDEISVKSVIRIIKKEDYITFAKYIRNDSNG

SEQ ID NO: 95185 - protein, 381 aa, Salmonella enterica; identical to SEQ ID NO: 94125

SEQ ID NO: 95186 - protein, 198 aa, Salmonella enterica; identical to SEQ ID NO: 94112

SEQ ID NO: 95187 - protein, 325 aa, Salmonella enterica; identical to SEQ ID NO: 93783

SEQ ID NO: 95188 - protein, 198 aa, Salmonella enterica; identical to SEQ ID NO: 94112

SEQ ID NO: 95189 - protein, 325 aa, Salmonella enterica; identical to SEQ ID NO: 93783

SEQ ID NO: 95190 - protein, 198 aa, Salmonella enterica; identical to SEQ ID NO: 94112

SEQ ID NO: 95191 - protein, 325 aa, Salmonella enterica; identical to SEQ ID NO: 93783

SEQ ID NO: 95192 - protein, 198 aa, Salmonella enterica; identical to SEQ ID NO: 94112

SEQ ID NO: 95193 - protein, 325 aa, Salmonella enterica; identical to SEQ ID NO: 93783

SEQ ID NO: 95194 - protein, 199 aa, Enterobacter xiangfangensis; identical to SEQ ID NO: 93940

SEQ ID NO: 95195 - protein, 319 aa, Enterobacter xiangfangensis; identical to SEQ ID NO: 93941

SEQ ID NO: 95196 - protein, 199 aa, Enterobacter xiangfangensis; identical to SEQ ID NO: 93940

SEQ ID NO: 95197 - protein, 319 aa, Enterobacter xiangfangensis; identical to SEQ ID NO: 93941

SEQ ID NO: 95198 - protein, 199 aa, Enterobacter xiangfangensis; identical to SEQ ID NO: 93940

SEQ ID NO: 95199 - protein, 319 aa, Enterobacter xiangfangensis; identical to SEQ ID NO: 93941

SEQ ID NO: 95200 - protein, 199 aa, Enterobacter asburiae; identical to SEQ ID NO: 93940

SEQ ID NO: 95201 - protein, 319 aa, Enterobacter asburiae; identical to SEQ ID NO: 93941

SEQ ID NO: 95202 - protein, 199 aa, Enterobacter asburiae; identical to SEQ ID NO: 93940

SEQ ID NO: 95203 - protein, 319 aa, Enterobacter asburiae; identical to SEQ ID NO: 93941

SEQ ID NO: 95204 - protein, 199 aa, Enterobacter xiangfangensis; identical to SEQ ID NO: 93940

SEQ ID NO: 95205 - protein, 319 aa, Enterobacter xiangfangensis; identical to SEQ ID NO: 93941

SEQ ID NO: 95206 - protein, 199 aa, Enterobacter xiangfangensis; identical to SEQ ID NO: 93940

SEQ ID NO: 95207 - protein, 319 aa, Enterobacter xiangfangensis; identical to SEQ ID NO: 93941

SEQ ID NO: 95208 - protein, 199 aa, Enterobacter xiangfangensis; identical to SEQ ID NO: 93940

SEQ ID NO: 95209 - protein, 319 aa, Enterobacter xiangfangensis; identical to SEQ ID NO: 93941

SEQ ID NO: 95210 - protein, 199 aa, Enterobacter asburiae; identical to SEQ ID NO: 93940

SEQ ID NO: 95211 - protein, 319 aa, Enterobacter asburiae; identical to SEQ ID NO: 93941

SEQ ID NO: 95212 - protein, 199 aa, Enterobacter xiangfangensis; identical to SEQ ID NO: 93940

SEQ ID NO: 95213 - protein, 319 aa, Enterobacter xiangfangensis; identical to SEQ ID NO: 93941

SEQ ID NO: 95214 - protein, 199 aa, Enterobacter xiangfangensis; identical to SEQ ID NO: 93940

SEQ ID NO: 95215 - protein, 319 aa, Enterobacter xiangfangensis; identical to SEQ ID NO: 93941

SEQ ID NO: 95216 - protein, 199 aa, Enterobacter xiangfangensis; identical to SEQ ID NO: 93940

SEQ ID NO: 95217 - protein, 319 aa, Enterobacter xiangfangensis; identical to SEQ ID NO: 93941

SEQ ID NO: 95218 - protein, 199 aa, Enterobacter xiangfangensis; identical to SEQ ID NO: 93940

SEQ ID NO: 95219 - protein, 319 aa, Enterobacter xiangfangensis; identical to SEQ ID NO: 93941

SEQ ID NO: 95220 - protein, 199 aa, Enterobacter xiangfangensis; identical to SEQ ID NO: 93940

SEQ ID NO: 95221 - protein, 319 aa, Enterobacter xiangfangensis; identical to SEQ ID NO: 93941

SEQ ID NO: 95222 - protein, 203 aa, Sphingomonas sanguinis
MQLRKTSAFALYVGSYLPLSLVLLAQDIPPASLSLPFCRLTDVVGASCDLPLMHSWWSLGMVAACLTCLAITIMTLSMVTTPRRIDVAEVKHVPADLINYVIPYIVSFMGLDYGSPTKLLGFAVLFLWIFWITYRSGQIAMNPLLIVFGWRLFELKYSYLQSDEAWVGRALCRSEVNPNRTYNQGSLQDVMVLRDVEQGGTDG

SEQ ID NO: 95223 - protein, 305 aa, Sphingomonas sanguinis
MADLADLNAFDVEGSDLTVWVYRRAMRDGLPVFKGRWVGITDELASSLRAAVSGAIGAVDETIAYEVLAQNHETSVLTLGADETHIALVEAQAANPTEDLKVRKLSEIANSDFYMLRFATQGGVLLALRKTNASWSTRRSSGILRVVFDDQELDIDERPAFSLEPYFDFFVLGKDIFVSNKARFESVLAYRAGHVEAFEELVGEPDFSGIFSDMAAITEFVGTNKIHLRRAIAIREKGHFRDAGFMDNLRANCAAMGLVIAFDGEGRIVPTPETCRDIFQALLDHRLDSRLSMRIYDVQSTEPVG

SEQ ID NO: 95224 - protein, 203 aa, Novosphingobium barchaimii
MQLRKMSAFALYVGSYLPLSLVLMAQDIPAASLALTFCRPIDITNGSCVLPLMHPWWSLGMVGVTAVCLAITLTALNVVGTPRRIMVAEVKHIPADLINYVIPYIVSFIGLDYGEPTKLLGFAVLFLWIFWITYRSGQIAMNPVLIVFGWRLFELKYSYLQSEDERVGRALCQAEVHPNRIYQQGSLQDVMILRKRGQRETDG

SEQ ID NO: 95225 - protein, 305 aa, Novosphingobium barchaimii
MADLADLNAFDVVESDLTVWVFKRSTRGGLPVFKGRWVGITDELAASLRNAVAGAIGAVDETIVYEVLAQNHETSVLTLGADETHIALVEAQATNPTEDLKVRQLREIANSDFYMLRFASEDGVLLAVRKTNATWSTRRSSGILRVVFDDEELDIDERPAFSLEPYFDFFVLGGDIFVSNKTRFESVLAYRAGHVDAFEALVGEPDFSGIFSDMAAITEFVGTNKIHLRRAIAIREKGHFRDANFMNNLRANGAAMGLTIGFDGQGRIVPTPETCRDIFQALLDHRLDSRLSMRMYDVQSTEPVG

SEQ ID NO: 95226 - protein, 142 aa, Salmonella enterica subsp. enterica serovar Agona
YWWYKRQLSFLDRGITSAEVVVVGCEKESTEYLSFLSTYIMPLVFTDLTKPSNVFNFIFILVIVGFLHIKTRRIHSNPTLSLFGVSAYKIDYIIRVDGQDSDITKGLIVLSKDEISVKSVIRIIKKEDYITFAKYIRNDSNG

SEQ ID NO: 95227 - protein, 381 aa, Salmonella enterica subsp. enterica serovar Agona; identical to SEQ ID NO: 94125

SEQ ID NO: 95228 - protein, 198 aa, Salmonella enterica subsp. enterica serovar Typhimurium; identical to SEQ ID NO: 94112

SEQ ID NO: 95229 - protein, 325 aa, Salmonella enterica subsp. enterica serovar Typhimurium; identical to SEQ ID NO: 93783

SEQ ID NO: 95230 - protein, 198 aa, Salmonella enterica subsp. enterica serovar Typhimurium var. 5-; identical to SEQ ID NO: 94112

SEQ ID NO: 95231 - protein, 325 aa, Salmonella enterica subsp. enterica serovar Typhimurium var. 5-; identical to SEQ ID NO: 93783

SEQ ID NO: 95232 - protein, 198 aa, Salmonella enterica subsp. enterica serovar Hadar; identical to SEQ ID NO: 94112

SEQ ID NO: 95233 - protein, 325 aa, Salmonella enterica subsp. enterica serovar Hadar; identical to SEQ ID NO: 93783

SEQ ID NO: 95234 - protein, 198 aa, Salmonella enterica subsp. enterica serovar Typhimurium; identical to SEQ ID NO: 94112

SEQ ID NO: 95235 - protein, 325 aa, Salmonella enterica subsp. enterica serovar Typhimurium; identical to SEQ ID NO: 93783

SEQ ID NO: 95236 - protein, 198 aa, Salmonella enterica subsp. enterica serovar Typhimurium var. 5-; identical to SEQ ID NO: 94112

SEQ ID NO: 95237 - protein, 325 aa, Salmonella enterica subsp. enterica serovar Typhimurium var. 5-; identical to SEQ ID NO: 93783

SEQ ID NO: 95238 - protein, 198 aa, Salmonella enterica subsp. enterica serovar Typhimurium var. 5-; identical to SEQ ID NO: 94112

SEQ ID NO: 95239 - protein, 325 aa, Salmonella enterica subsp. enterica serovar Typhimurium var. 5-; identical to SEQ ID NO: 93783

SEQ ID NO: 95240 - protein, 214 aa, Salmonella enterica subsp. enterica serovar Agona; identical to SEQ ID NO: 94460

SEQ ID NO: 95241 - protein, 305 aa, Salmonella enterica subsp. enterica serovar Agona
MAEEKLDLSELHHDAQKASELSSYYSHFDTKVEDFDLHVYFNFRHKIKGGDGKYRYEYRVAKIDDTTVLKESIKDNVITKTLNDLSSGGVAVSDIKQLSDRASTISFLEDAKSYKDEQMSFLTGIIFDKGFGGDGDIPVVNFEKFDKISKVDSIVFVLRKGDKCITIYKKQYPIQNLTKQKNHYFSYSKDTLSKIDADMISIDGKASIVFVKGTAYIYDQDVFEKFFGYKKWIKKVAGEFVSEMKQKFSSIVDFGKVTDRLEKESADADAFSRKLARIYNNKDLRASFNTVTPEKISDFLVENEY

SEQ ID NO: 95242 - protein, 198 aa, Salmonella enterica subsp. enterica serovar Typhimurium var. 5-; identical to SEQ ID NO: 94112

SEQ ID NO: 95243 - protein, 325 aa, Salmonella enterica subsp. enterica serovar Typhimurium var. 5-; identical to SEQ ID NO: 93783

SEQ ID NO: 95244 - protein, 198 aa, Salmonella enterica subsp. enterica serovar Typhimurium; identical to SEQ ID NO: 94112

SEQ ID NO: 95245 - protein, 325 aa, Salmonella enterica subsp. enterica serovar Typhimurium; identical to SEQ ID NO: 93783

SEQ ID NO: 95246 - protein, 198 aa, Salmonella enterica subsp. enterica serovar Typhimurium var. 5-; identical to SEQ ID NO: 94112

SEQ ID NO: 95247 - protein, 325 aa, Salmonella enterica subsp. enterica serovar Typhimurium var. 5-; identical to SEQ ID NO: 93783

SEQ ID NO: 95248 - protein, 198 aa, Salmonella enterica subsp. enterica serovar Typhimurium var. 5-; identical to SEQ ID NO: 94112

SEQ ID NO: 95249 - protein, 325 aa, Salmonella enterica subsp. enterica serovar Typhimurium var. 5-; identical to SEQ ID NO: 93783

SEQ ID NO: 95250 - protein, 198 aa, Salmonella enterica subsp. enterica serovar Hadar; identical to SEQ ID NO: 94112

SEQ ID NO: 95251 - protein, 325 aa, Salmonella enterica subsp. enterica serovar Hadar; identical to SEQ ID NO: 93783

SEQ ID NO: 95252 - protein, 198 aa, Salmonella enterica subsp. enterica serovar Hadar; identical to SEQ ID NO: 94112

SEQ ID NO: 95253 - protein, 325 aa, Salmonella enterica subsp. enterica serovar Hadar; identical to SEQ ID NO: 93783

SEQ ID NO: 95254 - protein, 198 aa, Salmonella enterica subsp. enterica serovar Typhimurium var. 5-; identical to SEQ ID NO: 94112

SEQ ID NO: 95255 - protein, 325 aa, Salmonella enterica subsp. enterica serovar Typhimurium var. 5-; identical to SEQ ID NO: 93783

SEQ ID NO: 95256 - protein, 198 aa, Salmonella enterica subsp. enterica serovar Hadar; identical to SEQ ID NO: 94112

SEQ ID NO: 95257 - protein, 325 aa, Salmonella enterica subsp. enterica serovar Hadar; identical to SEQ ID NO: 93783

SEQ ID NO: 95258 - protein, 198 aa, Salmonella enterica subsp. enterica serovar Enteritidis; identical to SEQ ID NO: 94112

SEQ ID NO: 95259 - protein, 325 aa, Salmonella enterica subsp. enterica serovar Enteritidis; identical to SEQ ID NO: 93783

SEQ ID NO: 95260 - protein, 198 aa, Salmonella enterica subsp. enterica serovar Typhimurium var. 5-; identical to SEQ ID NO: 94112

SEQ ID NO: 95261 - protein, 325 aa, Salmonella enterica subsp. enterica serovar Typhimurium var. 5-; identical to SEQ ID NO: 93783

SEQ ID NO: 95262 - protein, 198 aa, Salmonella enterica subsp. enterica serovar Typhimurium; identical to SEQ ID NO: 94112

SEQ ID NO: 95263 - protein, 325 aa, Salmonella enterica subsp. enterica serovar Typhimurium; identical to SEQ ID NO: 93783

SEQ ID NO: 95264 - protein, 198 aa, Salmonella enterica subsp. enterica serovar Typhimurium var. 5-; identical to SEQ ID NO: 94112

SEQ ID NO: 95265 - protein, 325 aa, Salmonella enterica subsp. enterica serovar Typhimurium var. 5-; identical to SEQ ID NO: 93783

SEQ ID NO: 95266 - protein, 198 aa, Salmonella enterica subsp. enterica serovar Typhimurium var. 5-; identical to SEQ ID NO: 94112

SEQ ID NO: 95267 - protein, 325 aa, Salmonella enterica subsp. enterica serovar Typhimurium var. 5-; identical to SEQ ID NO: 93783

SEQ ID NO: 95268 - protein, 198 aa, Salmonella enterica subsp. enterica serovar I 4,5,12:i:-; identical to SEQ ID NO: 94112

SEQ ID NO: 95269 - protein, 325 aa, Salmonella enterica subsp. enterica serovar I 4,5,12:i:-; identical to SEQ ID NO: 93783

SEQ ID NO: 95270 - protein, 214 aa, Salmonella enterica subsp. enterica serovar Kentucky; identical to SEQ ID NO: 94460

SEQ ID NO: 95271 - protein, 381 aa, Salmonella enterica subsp. enterica serovar Kentucky; identical to SEQ ID NO: 94125

SEQ ID NO: 95272 - protein, 198 aa, Salmonella enterica subsp. enterica serovar Hadar; identical to SEQ ID NO: 94112

SEQ ID NO: 95273 - protein, 325 aa, Salmonella enterica subsp. enterica serovar Hadar; identical to SEQ ID NO: 93783

SEQ ID NO: 95274 - protein, 198 aa, Salmonella enterica subsp. enterica serovar Typhimurium var. 5-; identical to SEQ ID NO: 94112

SEQ ID NO: 95275 - protein, 325 aa, Salmonella enterica subsp. enterica serovar Typhimurium var. 5-; identical to SEQ ID NO: 93783

SEQ ID NO: 95276 - protein, 214 aa, Salmonella enterica subsp. enterica serovar Agona; identical to SEQ ID NO: 94460

SEQ ID NO: 95277 - protein, 381 aa, Salmonella enterica subsp. enterica serovar Agona; identical to SEQ ID NO: 94125

SEQ ID NO: 95278 - protein, 198 aa, Salmonella enterica subsp. enterica serovar Typhimurium; identical to SEQ ID NO: 94112

SEQ ID NO: 95279 - protein, 325 aa, Salmonella enterica subsp. enterica serovar Typhimurium; identical to SEQ ID NO: 93783

SEQ ID NO: 95280 - protein, 198 aa, Salmonella enterica subsp. enterica serovar Typhimurium var. 5-; identical to SEQ ID NO: 94112

SEQ ID NO: 95281 - protein, 325 aa, Salmonella enterica subsp. enterica serovar Typhimurium var. 5-; identical to SEQ ID NO: 93783

SEQ ID NO: 95282 - protein, 192 aa, Thermococcus celericrescens
MEEKPTLLTRLWLFLSSYIPLWVILLIQTYDGPKGFHTIFFGLLSIFSLLSLLLFLRVARQKLNVGKGERICDNFIVVDEYQDMNHVYFEYLVTYVVSMMSFIPKDQGMRNILTFLVFMLMVFTFYLRANLIYANPVLGALGYNMFRVKNRESGHWVLLITRKDKILIADKTNPEKICVSSLSGNIFLEVED

SEQ ID NO: 95283 - protein, 385 aa, Thermococcus celericrescens
MDEPEKSRVLARGQTIITLKKFHSKINEVADMTVDVYLVESTGKKAKDPRTWFRTHNLILPTSYRRKIVKLFNQKFLRVINKISKDDTDFTNFFDYNRPFSGGVVRYIEPQHIPGFEVIWNQIRQGGSKSSTSAKGVKSIVGYVLDIQFKDGGRVAFFVKNRRSFILKKNSIMVGLFRKQLSLATDDYTSIPLAIDSIYFEFPDSDNDGWLLVLNTRYFESFFKYYEHYKQITQETMSKLKGSGFIEFENEGKVMKYALSTVTIFRTLTQLQKSKFFSFITDDGVDTGSERYKNFVNDLLDQLDVLSAKERPNLKVTEDDDHIRIKIEDKKGLKQFIEICQRKYMATVSRRSGVVRFYEVKGGVRELKQLPLDVWLRTKPQGETA

SEQ ID NO: 95284 - protein, 200 aa, Clostridium autoethanogenum DSM 10061; identical to SEQ ID NO: 94128

SEQ ID NO: 95285 - protein, 301 aa, Clostridium autoethanogenum DSM 10061
MFELQDAKMELECKEDISLSCIFISQNFELSKVLIEKELKDDLIKSFIDRFLRSTKEKKVVEYDPIVKLDDCIDSINIQEIPNLNNMQDKFDDISNIKLIDKFSDIETSRAYAIILNNRKSNNKVILFKKFLSSIYLKSKFKILLSEGKMKKIDKDILSLNNKFDCVMYKEDIAIFTQLYFEQIFDYKDEYTKKANKTISKIKKLNIIENIDNIESDCEKITIKKKMSKIKDESINWFKEKVESNIEDIKNIISKANLDMEVRNGKIISNDTSELIHLIQDDYLKSNLSGNNFVADKKTKI

SEQ ID NO: 95286 - protein, 197 aa, Enterobacter cloacae subsp. cloacae; identical to SEQ ID NO: 94106

SEQ ID NO: 95287 - protein, 323 aa, Enterobacter cloacae subsp. cloacae; identical to SEQ ID NO: 94107

SEQ ID NO: 95288 - protein, 194 aa, Xanthomonas citri pv. citri; identical to SEQ ID NO: 93946

SEQ ID NO: 95289 - protein, 309 aa, Xanthomonas citri pv. citri; identical to SEQ ID NO: 93687

SEQ ID NO: 95290 - protein, 194 aa, Xanthomonas citri pv. citri; identical to SEQ ID NO: 93946

SEQ ID NO: 95291 - protein, 309 aa, Xanthomonas citri pv. citri; identical to SEQ ID NO: 93687

SEQ ID NO: 95292 - protein, 194 aa, Xanthomonas citri pv. citri; identical to SEQ ID NO: 94484

SEQ ID NO: 95293 - protein, 309 aa, Xanthomonas citri pv. citri; identical to SEQ ID NO: 93687

SEQ ID NO: 95294 - protein, 194 aa, Xanthomonas citri pv. citri; identical to SEQ ID NO: 94484

SEQ ID NO: 95295 - protein, 309 aa, Xanthomonas citri pv. citri; identical to SEQ ID NO: 94489

SEQ ID NO: 95296 - protein, 194 aa, Xanthomonas citri pv. citri; identical to SEQ ID NO: 93946

SEQ ID NO: 95297 - protein, 309 aa, Xanthomonas citri pv. citri; identical to SEQ ID NO: 93687

SEQ ID NO: 95298 - protein, 194 aa, Xanthomonas citri pv. citri; identical to SEQ ID NO: 94484

SEQ ID NO: 95299 - protein, 309 aa, Xanthomonas citri pv. citri; identical to SEQ ID NO: 94489

SEQ ID NO: 95300 - protein, 194 aa, Xanthomonas citri pv. citri; identical to SEQ ID NO: 94484

SEQ ID NO: 95301 - protein, 309 aa, Xanthomonas citri pv. citri; identical to SEQ ID NO: 93687

SEQ ID NO: 95302 - protein, 194 aa, Xanthomonas citri pv. citri; identical to SEQ ID NO: 94484

SEQ ID NO: 95303 - protein, 309 aa, Xanthomonas citri pv. citri; identical to SEQ ID NO: 94489

SEQ ID NO: 95304 - protein, 194 aa, Xanthomonas citri pv. citri; identical to SEQ ID NO: 94484

SEQ ID NO: 95305 - protein, 309 aa, Xanthomonas citri pv. citri; identical to SEQ ID NO: 94489

SEQ ID NO: 95306 - protein, 194 aa, Xanthomonas citri pv. citri; identical to SEQ ID NO: 94484

SEQ ID NO: 95307 - protein, 309 aa, Xanthomonas citri pv. citri; identical to SEQ ID NO: 93687

SEQ ID NO: 95308 - protein, 194 aa, Xanthomonas citri pv. citri; identical to SEQ ID NO: 94484

SEQ ID NO: 95309 - protein, 309 aa, Xanthomonas citri pv. citri; identical to SEQ ID NO: 93687

SEQ ID NO: 95310 - protein, 194 aa, Xanthomonas citri pv. citri; identical to SEQ ID NO: 94484

SEQ ID NO: 95311 - protein, 309 aa, Xanthomonas citri pv. citri; identical to SEQ ID NO: 94489

SEQ ID NO: 95312 - protein, 194 aa, Xanthomonas citri pv. citri; identical to SEQ ID NO: 94484

SEQ ID NO: 95313 - protein, 258 aa, Xanthomonas citri pv. citri; identical to SEQ ID NO: 94497

SEQ ID NO: 95314 - protein, 194 aa, Xanthomonas citri pv. citri; identical to SEQ ID NO: 93946

SEQ ID NO: 95315 - protein, 309 aa, Xanthomonas citri pv. citri; identical to SEQ ID NO: 93687

SEQ ID NO: 95316 - protein, 194 aa, Xanthomonas citri pv. citri; identical to SEQ ID NO: 94484

SEQ ID NO: 95317 - protein, 309 aa, Xanthomonas citri pv. citri; identical to SEQ ID NO: 93687

SEQ ID NO: 95318 - protein, 194 aa, Xanthomonas citri pv. citri; identical to SEQ ID NO: 94484

SEQ ID NO: 95319 - protein, 309 aa, Xanthomonas citri pv. citri; identical to SEQ ID NO: 93687

SEQ ID NO: 95320 - protein, 173 aa, candidate division TA06 bacterium 32_111
MFSKFIRKFILAITSLSPVAITFWFKDFSKKFNLFDGWFYLLIFLIIIIISFFMIRLAKKKLEVIKVTIHSIQNSDTEVISYIFAYILPFIGFDIKLTLFILFLYLFIVFTTNIYHFNPILGLFGYHYYTVSFDNGTTFVLITKKTLMNANEINSVVQLDDYTLLEVDKLEVN

SEQ ID NO: 95321 - protein, 310 aa, candidate division TA06 bacterium 32_111
MNFEALIAIINNSKNNDSTTNNSTTNNSTNNNSSNIRRVPISQDIQNELESHYKNILKNFLDEKDKVEFDGNYKCEDDEIYELEDFDWEKKIKNCDLTKEDFKNIITLNIISNDDFEKIKILIVSQIVSQDNYLIFQSMDNRKFIKPKSFLFYSNNTLNYEDKKGIKIDGNIDCIIELNSKRLFFTSFHNASKIFDLSDYYREATKTEINEFFSNEIFDGKIESDNLTSNIRKKIFLILKNETLQKVNKNFQQVKNYAEELGIDCFKKDKIELPKDNKKLKEIINFLNEDLYKSPISNAIYESNSKKMIK

SEQ ID NO: 95322 - protein, 173 aa, candidate division TA06 bacterium 34_109; identical to SEQ ID NO: 95320

SEQ ID NO: 95323 - protein, 310 aa, candidate division TA06 bacterium 34_109; identical to SEQ ID NO: 95321

SEQ ID NO: 95324 - protein, 197 aa, Clostridia bacterium BRH_c25
MRRVLLFISSYVPLYVLLVIKNILERCTSGGRFDLSIRKFETAVFFDEINDYAIMILLLLAIVSVVYLKVLLKQPEGTHYYSIVGIEDQTGNVYFNYISIYLLSCLGLTLSSIVDVFVLIFLMLIVGYIYISNHMTYMNPLLQLLGYKVYEGTVHSDSTNKDFQSVIIAPKSLVLQKNQTYSGSGKEDFIFLSQTQV

SEQ ID NO: 95325 - protein, 324 aa, Clostridia bacterium BRH_c25
MKKDDLKTKLNAFTKAIAEGKAEVNVMLVDQNNQRKQKYRGLMLKTKLNDIQSVIEKSCEYIDQELTNRTLDIYDLEISVDESTQMVNKVDVIYGREILDQITVEYTDSNTVSENTDLSHIKFMVIQVYTDKKSIYLFKKYVQPTTAYKTTEKYILSGGVLRPFTDEVITISSLVDAFLLDDVYYVFNRNAFNSIFAYKDVFKKILEKNAQMIEDSGLMTETKQFVADCEADGRYLTRLTKAILAKGFEEVSKRKDGIKQIVKDFDLSLALADTGEIVYKGKEDIPEVLNLLLRHYVIDALTSNKMIAAAIQEYQAGNKGGIAD

SEQ ID NO: 95326 - protein, 187 aa, Marinomonas fungiae
MTGNNEGLSLARLLMVLSSMSPLFILWAIKGWGIKGISEVYFLSFCLFFITVPNLFLWFRVRLVKKRKDRRELTAGDCEDHRDHLLVYLFAMLLPFYSVNIDSIRDLAGHVAAITFIVFLFWHLNMHYMNIFWAMKGFRVYTLKPDAENNSISGRIPVVLITKRSHIVKGEKISAYRLSQTVFLEDE

SEQ ID NO: 95327 - protein, 303 aa, Marinomonas fungiae
MPINFDFENVNITEFGLGLDSPNRGFVFVPVDEVVQKSLVEMVSFTKTLMQDKASSMATYQPSEKYASIEYLTFSINDPLVQELKNLHESENVPEDCSAFDNINQCFAYFVKLTDNNQQRITAVRRSTQFKTLIKKRHRLVQYVDNTLKSLEETVFKLDNDFDFIIQNDLIHILRPSGLEFTAQLQKAIMDAVPANIASIASEIDFVNFDSISQYAQNHPRAARYIASIKSQSEAINISQDKLERYCEKTNVVTNIVDGKINLDSSQIMGFLEVLDRRRYEIDLKDDGESEVYRAPSRSRVTS

SEQ ID NO: 95328 - protein, 212 aa, Clostridium sp. C105KSO14; identical to SEQ ID NO: 94048

SEQ ID NO: 95329 - protein, 350 aa, Clostridium sp. C105KSO14; identical to SEQ ID NO: 94049

SEQ ID NO: 95330 - protein, 172 aa, Enterobacter aerogenes; identical to SEQ ID NO: 93926

SEQ ID NO: 95331 - protein, 297 aa, Enterobacter aerogenes; identical to SEQ ID NO: 93927

SEQ ID NO: 95332 - protein, 197 aa, Enterobacter cloacae
MDSRPYLKTVLYILSLWLLFLSLLIMSYDKVLIKNVWDYIFTGNFTFSISSLKVRNIVFIVSLIFIFIGAIILIVLANSFGSGWSVACTVSDISNENHEHLEFLTTYIMPLVFTDVDSKRTVLNLGLMIFVIGAIYVKTNRFYSNPSLAILGFRIYKANVHDRGVKKCTVICRSVLKSTDNIKYIKIDDETYLAKIV

SEQ ID NO: 95333 - protein, 323 aa, Enterobacter cloacae; identical to SEQ ID NO: 94571

SEQ ID NO: 95334 - protein, 172 aa, Enterobacter cloacae
MNKLARLLLTASSIAPVCATLFFIGFVKETLWLMNYSLYVGLVSWLLAIGLIKYSEWKLEVLTKNINSLSPANKEVTNYFLSYLFPLLGTDSIAENKSYAAFFYISLLFYICFSENYNFNPVLSLHGYKFYEAEDDTGVGFVLISKSVITDIQNISFNVVQLTDYTYLHVEG

SEQ ID NO: 95335 - protein, 294 aa, Enterobacter cloacae
MALFALMDNSIATKIMRVELDKPASTAVKTIFQQQKLHFESHHSTVIPFYAGYTPRYDECFEVQNFAAASSLIDAVKRPTAIPIWDPSIIDITNIKALFVGVDAPANPNIIALQTFNKKQILDTSKSFLGTLVGKKTTFSKAVSTGFNVDDKLVAIIDTDHIFFKSFFVLRSVFDMTTYFEAATDQQLDTFSQLPIFSTQHGFDLKIVADTVIRNKVTLINQTGLLTPQNLPLFKAEAQKVNFPLQTTINGGVETITMPILKKEIKALLDFIEEDIWISGISGRRFKSSSKRPI

SEQ ID NO: 95336 - protein, 197 aa, Enterobacter cloacae; identical to SEQ ID NO: 93954

SEQ ID NO: 95337 - protein, 323 aa, Enterobacter cloacae; identical to SEQ ID NO: 94023

SEQ ID NO: 95338 - protein, 169 aa, Aeromonas hydrophila; identical to SEQ ID NO: 94018

SEQ ID NO: 95339 - protein, 295 aa, Aeromonas hydrophila; identical to SEQ ID NO: 94019

SEQ ID NO: 95340 - protein, 204 aa, Escherichia coli; identical to SEQ ID NO: 93768

SEQ ID NO: 95341 - protein, 340 aa, Escherichia coli; identical to SEQ ID NO: 94081

SEQ ID NO: 95342 - protein, 204 aa, Escherichia coli; identical to SEQ ID NO: 93768

SEQ ID NO: 95343 - protein, 340 aa, Escherichia coli; identical to SEQ ID NO: 94081

SEQ ID NO: 95344 - protein, 204 aa, Escherichia coli; identical to SEQ ID NO: 93768

SEQ ID NO: 95345 - protein, 340 aa, Escherichia coli; identical to SEQ ID NO: 94081

SEQ ID NO: 95346 - protein, 204 aa, Escherichia coli; identical to SEQ ID NO: 93768

SEQ ID NO: 95347 - protein, 340 aa, Escherichia coli; identical to SEQ ID NO: 94081

SEQ ID NO: 95348 - protein, 173 aa, Klebsiella pneumoniae subsp. pneumoniae; identical to SEQ ID NO: 93860

SEQ ID NO: 95349 - protein, 289 aa, Klebsiella pneumoniae subsp. pneumoniae
MSLFAMMNKNSAVKVYRIDTDRQTDIKIKKIFDDQLSLFESHHNTELVFEAGYTPSYNECSYIDNFDEGKILLDAVQRSTAMPLWTKNVGLNDITAFFMAPTYPQVKDKIAIQTFSKKQILNESRYLWLSKNSFTMSDLLGFNLDDKLVAILEGDKIKFRNFNNLRSIFDMSSYFAEATKQEISDFVNQPVFNIPMGFDLPALADNVIRKKVTLINKSKILVNHTVTEIKNAALTLNFPIKTTGSGSSEKIEMPTNKKEIKELLNFLDEDYFNSEITKQRFRSNSKRKA

SEQ ID NO: 95350 - protein, 195 aa, Burkholderia stagnalis
MKMRLFPALILFLGSYFPLSLILLVQDVKETSWKTHMCRIAEMLSCHFPELANPERALGLLGICAVSLVIFMVLMRNLSGYSSLDVIDSKSIPNDLINYVFPYVVSFMGLDLGVNGKFFGFLLFIVLMFLITFRSGQILMNPFLLIAGWQLYELNIVTEGRKRCVKALSKEPVRSGDHLESCLVHGIYVLHRGEK

SEQ ID NO: 95351 - protein, 270 aa, Burkholderia stagnalis
MSDALRDQLKGLASSYQTSHTIAEEYNLLSQPSEGGFLAVSREGTLFPSLQGLIDQPLEECLVKNVKQLNNAAGYVLRLRHGEVVIYCVKKASADWATRKKNGMMNIFFTESRLDIIDSPSFSISRSFDFFVVGENVLMTNKPAFESLLNHKDTYEEAYAALKQEPGFSGAIVDLSVFDAFIGKNATHLRRMAVIRARGYYKNVDYMARLREISGLRGWGIQFDDQGRIVATPGKMRDILHVLLDHRLRSELSDNQYDVPSTTPVGQSVS

SEQ ID NO: 95352 - protein, 172 aa, Burkholderia sp. FL-7-2-10-S1-D7
MFGKIVKTYFIATALAPVCFSLSYVVTLKQGFLPWGLVALATAILLGGSCVGIVNLAKTRLETLPITIKKAKSADKDVIGFFVAYVLPLFFAKSLNLEPTAIFIFIALLAFVIWGTHSIQVNPLLGIFGYHFYEVDSESGISFLLITKRKIVNVKSITDVAQLTEYLILDRS

SEQ ID NO: 95353 - protein, 305 aa, Burkholderia sp. FL-7-2-10-S1-D7
MPDTQLNLFVLTDINENRVMRVSVTQELQKSITELLLEQEERFFSGIEEGDYYKFDGKYRPEERELLYIDEFDDIDKLGAAIADPLGYPELSIENGGLEHVRAVFSGYTKDGKTRVLAQAFDRRRIISPKGFSIIHSKDKFVKFDGTGLTLDNKLTAVLDGQKLLFSSFHFVRTIFDVSGYFKEATDADVKDFCRIAEKPAEAQKAFLDTCDGWIRRKIGLIRQSGILEKTPADQISKVATSFDIEIKTQEIDGKIVIEFPETRAELKRLLRFLDEDYYQSPLSDARYISNSKTVARPAKGAAKA

SEQ ID NO: 95354 - protein, 200 aa, Enterobacter cloacae; identical to SEQ ID NO: 94160

SEQ ID NO: 95355 - protein, 304 aa, Enterobacter cloacae; identical to SEQ ID NO: 94161

SEQ ID NO: 95356 - protein, 200 aa, Enterobacter cloacae; identical to SEQ ID NO: 94218

SEQ ID NO: 95357 - protein, 318 aa, Enterobacter cloacae; identical to SEQ ID NO: 94219

SEQ ID NO: 95358 - protein, 205 aa, Vibrio harveyi
MIETKSRETNINIWVELLIFISSYYPLFLILLIKDVTSKTVGIQFGLPHWELYVSIWALIGIFVSSGATLVTGKLMRFLFTGAEGSKQITLTEAKAVRGDMINYTLPFLIGLFAFDYKSIQSIVSLVVFLSFMFAFSRKDKLILLNPMFLLLGMRLYEIKYKRVGQPKVVHSASALCWGVAKASDTRVRFLENSGITFISALVDR

SEQ ID NO: 95359 - protein, 347 aa, Vibrio harveyi
MTINQSNTAEAMQEEVQLGLDQASLDAKLSELQALDLSEATVDLWVAKVKVGNKTKRFGEIKNLNVHSDFQDHFRQYVIECIRGNQHIEELRPITTVQDNRFFHVESSATDLCQLSEQVETGRLLTVNQAAELNNYNAYAIQLTFGNPEQSIYAFRYIKGAWSVNNTANKTLRPKVMGNQLVVEIDQSYKFQITPYIDFIQYKDDVFIADLAQFETAMNYHERLREKKTEAITALGQSPAMNSSESTKLRSVVGDDKRLMRQLASVYQKGHYGNELWLQKLRDAANEAGNWKIKFDDHGKILVEESKDYVKELLVLLQNKRVKTVVDGLMFDVEGELVEISNLASES

SEQ ID NO: 95360 - protein, 172 aa, Klebsiella pneumoniae subsp. pneumoniae; identical to SEQ ID NO: 94796

SEQ ID NO: 95361 - protein, 289 aa, Klebsiella pneumoniae subsp. pneumoniae; identical to SEQ ID NO: 94027

SEQ ID NO: 95362 - protein, 192 aa, Burkholderia territorii
MSRLVKVGMYLLSLWLLFVLVIVNKADVDVTICLGCAFLPRPALATLALKNLLPLVCVAMLAASSIFYALFVKIISGAKDGPIKIEELEDKNAEHLVFLATYVIPLVGFSLDSPRQMINLAITLLLLGAIYIKTDLFYANPTLSLLGFKIFNVKAQGNTAILISREEIEIGDSVNVLRLDKKIFFARKATRI

SEQ ID NO: 95363 - protein, 305 aa, Burkholderia territorii
MKTKQELKDHLDAIFVDGVNMKLYFGLGAGAARVYKLADFDDRATNAVLANYAASVREFFERDELQTVLLSQMDQRSDALVMYDLQEQPIEFAQLQALQNEDEPDFFSFNENNVGEIRSIAIKIASAQQSVVFFKTFYPVSLVRRDQILLYKLENRFTIFDGDLIKVTPGFDVLLADGEFYINDFSKFEKAFSFTEIAERAMLSVVQSILQMGIVNDVKGYLAACVAPKRDILRAGQSDVLRLDAAVILAFATQKAEKIGLKIVDGQFHLSSRDSVKRFYKLLNDDYLTSGLTAFEYETLAKNKM

SEQ ID NO: 95364 - protein, 193 aa, Pseudomonas savastanoi pv. nerii; identical to SEQ ID NO: 93722

SEQ ID NO: 95365 - protein, 304 aa, Pseudomonas savastanoi pv. nerii; identical to SEQ ID NO: 95087

SEQ ID NO: 95366 - protein, 197 aa, Serratia marcescens
MGNLKLKVLLYILSLWLLFFSLFIMSWDSDFLSKAYSHILGEMGFSFSLYEKLKTRNYVFLLSLLFMFIGFLGFGYFYFKTSAGWSATVIADDVSNENHEHLEFLTTYVMPLVFTDVNSKRTALNLLVMIIAIGAIYIRTNKFYSNPSLAILGFKIYKAKIKNQGDKKYIVICRGVISDGTYFKYIKLDDSTLLVKA

SEQ ID NO: 95367 - protein, 320 aa, Serratia marcescens
MFNSLSSLCTSAHTSCEMFFITKSNTTSQLEVKKIALEPSAQASLTTKFTKKFQDDVINKTSSNSSLNPVSALLSKGDEIYEYDITPPAEEFVLIEQISQFTASSIVKNFNFSTDSFSDIKGIVLNLTDGNDSLFLYQHTYQVSLHKKSGLSFLKSMNGNLLTEVDHDVIDVRKDFDFFYFNGKHYICNLKVLENHYGLNSIIDNMVSLAIPKIVSLNIIDVSGTPNPLEIFDDMKSNRSCMKKLAKIQSNNLPAITIQQISVILNDFPKFGRELSIKNNLIELSSQKKKLLFIRLLNDEAVRSALTNNVFLADDRESAI

SEQ ID NO: 95368 - protein, 193 aa, Agrobacterium vitis
MSVGVNEGLGLVRFILVWSSLSPVFLLWAIRGVEAVEDVIWVPICLILFLLPTLILYWYFRRARKNENVKTISVCTSKDQREHLLTYLFAMLIPLFDANLGGLREIVAISIAFLFIMFLFWHMRLHYMNLIFAIWGYRIFTVEAKLGTTEKDRHADRLITYAIISRRHYLPEGEALTGYRLGGNVLVDRAIDD

SEQ ID NO: 95369 - protein, 305 aa, Agrobacterium vitis
MIDQEFDAAAIASVNFGVRLRSNGNMHFVPTDGPTKDALKEIFRDTIAIFNSIPTGWELHDISEDYGNPRRIYAARAGEFMAELSSVFDAGALADLTNLHDHAHDVEFYFCEFTDAQQRRAVAIKKGTRLKGTLSARNRLMRLVDDTLVLIEEEVLRLDQEFDVIVTDPHVFILNVRAVEQIAKIVEHVAATAAVKVQAIHDAIPFLDLSRIRDKISRHPRMARNAASIAAHPNLAKFQRPFIETMAAKHGIKFQELEDGRLQCRVTDEAKLLELLDARRYHLDLAGDGGDPFRASGRQKVSASG

SEQ ID NO: 95370 - protein, 178 aa, Pseudomonas fluorescens
MLGKPTRVLLALTAIAPVSVSLAYVFGARKGEWLLCVLAICVCLILGIISSWIITEASAQFERLPVVIKKVKSADKEVVGFFVAYALPLIFKGEAGLDFGAWMLAGGMLIFVLWTTHALHVNPVLGLLGFHFYEVETQEGVTYLMLTKRTINNVSSIKSVVQLTEYGILEAKTKEKTK

SEQ ID NO: 95371 - protein, 287 aa, Pseudomonas fluorescens
MNLFALMDVAGARLIRFPLSVDLSADISTVFNDQHTEFFRGVDTIIPFDGRYTPEEGELLEIPDFADVDGLLAAVANPLSVDQYDPKTHSLDLVRAIFTGIEVAGVPRVLMQIFERRRLIARAGLMLFFANNQFQKMSESGLSLDTKLLAVLEGTNLKFQSFHFAKRVFDLSEYFREATNEEVTTFAGHEKLAVQDVQVFLAAAGPQIRKKISLIRQSAVLENYSTDQIVAVAASMQFPLALSDDGRIIVPDNNTELRKLLRFLDEDYYESPLSNTRFISNSKRKAD

SEQ ID NO: 95372 - protein, 180 aa, Aerococcus sanguinicola
MNLLFRILLYISSYLPLVVLIFIQNMYDLTWKAAYKTLVNNIFFWKVVFLAVLFSSMALIFWLIAIKKESASDGRKYSVDNLKEIDVEVLNYFVTYIVPLLSLDISSKTSILVNFLFIVLLGIYFVRNNALHFNIMLILLGYHIYTNDKDHIIISKRTLYEIKNNALKADQIGTSQIFYI

SEQ ID NO: 95373 - protein, 294 aa, Aerococcus sanguinicola
MNLDTVVNQIRNSNIIHLHMCQKNPQGYVTFTPNITDQVKNELKRISIDYLETKANIKQVEYNPTRTISGTVETVKFQDFDSVTEFFETFKEEAGIGEITPILIDFFIYEFEIQDKSIYLFRRHNKNKALRKGILGKILKGYYKSIETEDILTIDDKIDFLVYENEIIVFYHTAFERIFNLDAEFYDKAEIVLEADMFKNKIIGYDALKEDLLDNKNLVKRVSKLEGDIDKATMFLKHMRRTEAVINRFDLPISIIGDQICYEDKSQLGEIVLLMQDAYYRTFIGEEDGVDEGR

SEQ ID NO: 95374 - protein, 193 aa, Aggregatibacter actinomycetemcomitans NUM4039; identical to SEQ ID NO: 93842

SEQ ID NO: 95375 - protein, 313 aa, Aggregatibacter actinomycetemcomitans NUM4039; identical to SEQ ID NO: 93845

SEQ ID NO: 95376 - protein, 200 aa, Klebsiella oxytoca
MNAESRKNKEQIRRKVDLYILSLAILFVFFIFITCKFPVCFSSQCKFIGWEVLLKNNIVPAICIILLLYSFFAYYRFKYDTKKSVELPVKIVKLEKINYEHLTFLATYIIPLITFDFEKERYILVLAALLVIMGVIYIKTDLFYANPSLALLGFNIYKVDINISGNVIREGVIVITRRKLEAGKMFSYIVLDDRVYYSGN

SEQ ID NO: 95377 - protein, 324 aa, Klebsiella oxytoca; identical to SEQ ID NO: 94331

SEQ ID NO: 95378 - protein, 173 aa, Sphingobium sp. AM
MLNAFARILLTSSAIAPVGLTYAWIAYMQDQPKPAIYILAASLATVGICLMLLRYARKNLEASQFQAVEIEAADRENMGFLLLYLLPLFTSQFNTLNWQLWIPTLVIFALITATGYNYHFNPLLGLLKWHFYKVQSKEGVTYVLITKKQLRTVANAVTVGQLTEYILIDLEDA

SEQ ID NO: 95379 - protein, 288 aa, Sphingobium sp. AM
MVNLFALCRLTTGLQVKRVALAQPVQAKVGHIFQTQANYFLNGVAEEVDFSGDWKPDDDELLVIDAPAEAAVITATIAANPISLPEIDAQNFMAEGIRGLFVIDPVGQGHRVLIQAFSAQQLLSRRFTLFQSGNSFKELTEPGFTLDNSIVAIMEGGKLKFKSFQRTRSVFDLQQFYKAATDQEVDAFCQHASLEVADVAAFKVAADQGVRKLVHAITKANVLNTHQVDVIATKAASLGINITVQNGKLLVPTDRKSIKTLFRFLDDGIYQAALSASRYVTNSKRRIP

SEQ ID NO: 95380 - protein, 195 aa, Vibrio parahaemolyticus; identical to SEQ ID NO: 94306

SEQ ID NO: 95381 - protein, 328 aa, Vibrio parahaemolyticus; identical to SEQ ID NO: 94307

SEQ ID NO: 95382 - protein, 172 aa, Escherichia coli; identical to SEQ ID NO: 93790

SEQ ID NO: 95383 - protein, 294 aa, Escherichia coli
MALFAVIDNTIATRIVRVELDATASTSVTAIFQQQRQYFESHHNNMIPFYAGYTPKHSECFEIQNFTDSARLIDAVNRPTAVPVWDPSQIDIGYIKALFVGVDAPANPNIIALQTFNKKQILDTSKSFFGKFFASKTTFSKANSIGFNVDDKLVAIIINDTIRFKSFFNLRSIFDMSSYFSAATDQELNAFSQLSVFSTPQGFDLKSVADTVIRNKVTLINQTGMLTPQNMSKFKSEAAKVNFPLQTIIVGGVEKIVMPSSKKEIKALLDFLEEDIWISGISGRRFKSNSKRPI

SEQ ID NO: 95384 - protein, 203 aa, Listeria monocytogenes; identical to SEQ ID NO: 94338

SEQ ID NO: 95385 - protein, 313 aa, Listeria monocytogenes; identical to SEQ ID NO: 94339

SEQ ID NO: 95386 - protein, 173 aa, Thalassospira sp. Nap_22
MLNWLAKLLLTSTAIAPVLLTYAWVAYQAGESKQAATLLGVCIVLILVCLGLLRYAKASLERMNFSPTTVEAADRENMGFLLLYLLPLFTAQFSTLNWQVWVPAIVIFAGVVATGYSYHFNPLLGLLGWHFYKVSTKEGVTYVLITKKQLRNATEAIEVGQLTEYIVIDVGGR

SEQ ID NO: 95387 - protein, 289 aa, Thalassospira sp. Nap_22
MPQNLFAACRVNNGQLIAKRVRLDNTVQQQVETIFRDQETSFRAGVTSEVAFDGAWNPDDDEFLTIDIPAEAAIFVDTINANAVAIPDINTAAFANEGIKALFTGSTVNGVTKVVVQRFTSQQMLERKFALLQHGNAFRRLSDPAFSLDTSLTCIVEGGKIKFKSQFKLRSIINMLDIYRAATDQEVQTFAGHASLEVADVAAFVDVTNQTTRKLIHAVAKNGTLDTYTPAAIQAAAQATGLGIDVQNGKIVVPSDHREIKALLQFLNESRYTGPLSGQPFVTNSQRPV

SEQ ID NO: 95388 - protein, 195 aa, Salmonella enterica; identical to SEQ ID NO: 93866

SEQ ID NO: 95389 - protein, 315 aa, Salmonella enterica
MTTQQLKEKISKIIDNFSGIRVVFTTTANELKLSRIEGSALNSIAEGFIDKIKEDIINNEDLTSPLLSNFDDRKNALFKFDYEQYPEEFNKITQAIAIPPNSQDYYNPLNKFTDVKGIIILISGDNKCLALYKNKTNLAVLRNSRKMFNLVPDPDGYLKQLPNEILRLDFNYDLFSIGEDFYIKNHKTLETQMKFHQVIEAQAVIALNSLRDSLLIEDISGLEKSSREISFARKLAKISKHSPVLGKIDTKTIIDYVSQHKYLSAILQINEAGNKLLIKTKTSQKHFIKLMSDDYLQSDLTKIIYMSIAKDRLDE

SEQ ID NO: 95390 - protein, 195 aa, Salmonella enterica; identical to SEQ ID NO: 93866

SEQ ID NO: 95391 - protein, 315 aa, Salmonella enterica; identical to SEQ ID NO: 95389

SEQ ID NO: 95392 - protein, 195 aa, Salmonella enterica; identical to SEQ ID NO: 93866

SEQ ID NO: 95393 - protein, 315 aa, Salmonella enterica; identical to SEQ ID NO: 95389

SEQ ID NO: 95394 - protein, 195 aa, Salmonella enterica; identical to SEQ ID NO: 93866

SEQ ID NO: 95395 - protein, 315 aa, Salmonella enterica; identical to SEQ ID NO: 95389

SEQ ID NO: 95396 - protein, 195 aa, Salmonella enterica; identical to SEQ ID NO: 93866

SEQ ID NO: 95397 - protein, 315 aa, Salmonella enterica; identical to SEQ ID NO: 95389

SEQ ID NO: 95398 - protein, 195 aa, Salmonella enterica; identical to SEQ ID NO: 93866

SEQ ID NO: 95399 - protein, 315 aa, Salmonella enterica; identical to SEQ ID NO: 95389

SEQ ID NO: 95400 - protein, 195 aa, Salmonella enterica; identical to SEQ ID NO: 93866

SEQ ID NO: 95401 - protein, 315 aa, Salmonella enterica; identical to SEQ ID NO: 95389

SEQ ID NO: 95402 - protein, 195 aa, Salmonella enterica; identical to SEQ ID NO: 93866

SEQ ID NO: 95403 - protein, 315 aa, Salmonella enterica; identical to SEQ ID NO: 95389

SEQ ID NO: 95404 - protein, 195 aa, Salmonella enterica; identical to SEQ ID NO: 93866

SEQ ID NO: 95405 - protein, 315 aa, Salmonella enterica; identical to SEQ ID NO: 95389

SEQ ID NO: 95406 - protein, 195 aa, Salmonella enterica; identical to SEQ ID NO: 93866

SEQ ID NO: 95407 - protein, 315 aa, Salmonella enterica; identical to SEQ ID NO: 95389

SEQ ID NO: 95408 - protein, 198 aa, Salmonella enterica
MKKRTGLKYALYILSLWLLFISLFIMSYDKNLFVSMSTYFSNKDITTLLSKITPKNIVFASSFIMIIAGVLIFLYLLFSFNSGWSVVCTVSDVKNESHEHLEFLTTYVMPLVFTDVNSKRTMLNLLIMIVAIGMIYVKTNRFYSNPSLALLGFRIFKAKINDRGTKEFVIICHGEIDDNSNIKYIKLDSGTCLAKVIQ

SEQ ID NO: 95409 - protein, 325 aa, Salmonella enterica
MFSAIDNIINSANLSGEAYFVADLQGQINVYRVALEPGAEQKLTLSFSDSLKRDVINPNIGLNSLPMVSSLLSRDKQVHEYDYQVINHLPAALEKMAEVLNFGVNNTPPDFDFARQNLSSVKGIIYYLCDGQGNGVVTYQHKYPISLHKKTKLSYFSANGRTLDEVTYDSIDINGNVDFFYFNNKYYALNISLLERSYGLEQVINNLAANATPHIINLNILDVTNQQNPLDIFNDMHKNRNFMRRLATTANSPLIQNGAITIAKIQTLIQKFPILGRNIIFNQTGLIELSSQKQKLYFIRLLNNEASFTALDQEPFLAVGKDSAA

SEQ ID NO: 95410 - protein, 198 aa, Salmonella enterica; identical to SEQ ID NO: 95408

SEQ ID NO: 95411 - protein, 325 aa, Salmonella enterica; identical to SEQ ID NO: 95409

SEQ ID NO: 95412 - protein, 171 aa, Escherichia coli; identical to SEQ ID NO: 93814

SEQ ID NO: 95413 - protein, 297 aa, Escherichia coli; identical to SEQ ID NO: 93815

SEQ ID NO: 95414 - protein, 204 aa, Escherichia coli; identical to SEQ ID NO: 93768

SEQ ID NO: 95415 - protein, 340 aa, Escherichia coli; identical to SEQ ID NO: 94081

SEQ ID NO: 95416 - protein, 204 aa, Escherichia coli; identical to SEQ ID NO: 93768

SEQ ID NO: 95417 - protein, 340 aa, Escherichia coli; identical to SEQ ID NO: 94081

SEQ ID NO: 95418 - protein, 172 aa, Escherichia coli; identical to SEQ ID NO: 93790

SEQ ID NO: 95419 - protein, 294 aa, Escherichia coli; identical to SEQ ID NO: 93881

SEQ ID NO: 95420 - protein, 211 aa, Escherichia coli; identical to SEQ ID NO: 93972

SEQ ID NO: 95421 - protein, 335 aa, Escherichia coli
MKNELEAFVQNNGLTGEMFFIINDNDNYIYRRVILHDENTEPLITENFKKSITDEIIKRISINDNGDAIIDNITDMNYEHKGVYYFDIASEDKSTIIKIIEEISSLTVADNPIDFKFNDVNLDNIIGLVYHMSDGDKNIFLYQHRYPNFLHKKSRLSFLGEGDVLVPIPYDMINISKVIDFFVFDGISYAINIKLLEERYGLTQVIDNMVSEVTPKIIEMEIVNKSVLAEPEKIFDDMKDDRGFMRKLARVLKNGILELNIDVNIVNEIKTSFPTIGRNIDIINDDNGIQYIKLTSKARKKAFIRLLNDEAVRSVLTQKPSIAQNHKPEKNNTPT

SEQ ID NO: 95422 - protein, 197 aa, Escherichia coli
MRNSGGGMIFRKINLYILSLSLLFFFFIVITIDIPICFGDKCKFIGFEKLISNNVVAIICALLFLYSIVAYFKFKYDIKQSTEIPFEVVKVEGINYEHLTFLATYVIPLITFDFEKTKYIIVLAMLLVVMGIIYIKTDLFYANPSLALMGFHIYKLDGVFKGGEKRDGIIVITRKKIKMGDSVKYIKLDDRVYYSGY

SEQ ID NO: 95423 - protein, 331 aa, Escherichia coli; identical to SEQ ID NO: 94173

SEQ ID NO: 95424 - protein, 197 aa, Escherichia coli; identical to SEQ ID NO: 95422

SEQ ID NO: 95425 - protein, 331 aa, Escherichia coli; identical to SEQ ID NO: 94173

SEQ ID NO: 95426 - protein, 203 aa, Listeria monocytogenes; identical to SEQ ID NO: 94338

SEQ ID NO: 95427 - protein, 313 aa, Listeria monocytogenes; identical to SEQ ID NO: 94339

SEQ ID NO: 95428 - protein, 202 aa, Pasteurella multocida subsp. multocida PMTB2.1
MLNRFARILLTISSISPICLSISLLIGLQSIQGIDEIPHKLERLLGHLLAWELSQKECVFLLSIGLFVVSVLLFPWVFYQAKKQAILQHPTQAFKLTSVTPAHREMANYFISYLFPLMAGAEIFSNLGIAVFFYMSIFIWVSYSGACTFNPILAFMGYKFYEAERSNNVHIIFIARNTLLDIDNSRFKVVRLTEHTYLQVKD

SEQ ID NO: 95429 - protein, 300 aa, Pasteurella multocida subsp. multocida PMTB2.1
MEFFAILNQDNAERILRFNIDEEAKQRMTTIFEESHQKFLQYNEHVSFNADETLTRTECFYIEQFETGLDFSFVRNNPEGIRELYLGKNAELEYIVAVIALTESNEILIQNFNRRNIVDLSRTFWTNPFTPNNQFVAASSDGIALDDKLISILSPTNTIYFRSFNVLRHIFEMDHYFKEATQEEITAFIERDSHFEVSGGFDLSQIDDTVVRTKVAIINKSQILEDYSVKDLIEAAGSIEYQLPVNEAKNKIAMPNHKKQFKDLLQFLSSNIYKDAITQQTRIAKSSRLYIPEPVTKIQN

SEQ ID NO: 95430 - protein, 193 aa, Steroidobacter denitrificans
MKSIRRKIDLYILSLGLLFVFFLIITAELPTSSFRLNDFASWKEFAASNPLPIASMFALLYCLFAYFRFDFDLKGATEIPFEIRKIEDINYEHLTFLATYVVPLISFDFGSRRQLIVLGLLLIVMGIIYIKTDLFYANPSLALLGFHIYRADGSFKNGEREGIILVCRGRLTEKQKVSYIKLDDRIYYVRGNT

SEQ ID NO: 95431 - protein, 321 aa, Steroidobacter denitrificans
MNAAELKETLQTYYDDYENIGVSVYAVLKNPENPGPLKLDIEAEASVGLKELFIQSLRDRFSNKDELTVIDLSSADERVDAVYVYDLEIPDELTSLETVISQDDLPLLNLSDESLSSIKALLIEIGNNVGQLVFYKTMAPVNIFGRASFFLRKTQSRLERLEDEFLRVSAGFQMLRINGSLLVLDLESVEKSFGFHDVIKREAAAGISAIEAARLIVNSDVLRELLDDVKYARRLTKVAKASPVLKAGVPSQDIVRFCQTFPNLAGRIRFNETEDRIVLDTKVSKDLFIKLLMDDFLTSELTKFHYTSVAKDSVDKEPEEP

SEQ ID NO: 95432 - protein, 173 aa, Sphingobium sp. 22B; identical to SEQ ID NO: 95378

SEQ ID NO: 95433 - protein, 288 aa, Sphingobium sp. 22B; identical to SEQ ID NO: 95379

SEQ ID NO: 95434 - protein, 176 aa, Gluconobacter thailandicus; identical to SEQ ID NO: 94612

SEQ ID NO: 95435 - protein, 278 aa, Gluconobacter thailandicus; identical to SEQ ID NO: 93943

SEQ ID NO: 95436 - protein, 176 aa, Acetobacter senegalensis
MLGRLAKFLLIASALAPVGLVYAWLAWCNKQHSIAMGIVAACAMLVLICVYLLRQARTSLERFPLNITSVEPADRENIAFMLLYLSPLFTSELGQININLLIPTLFIFTLLTATGYNYHFNPLLGLVGWHFYKVESTEGVTYVLITRKQLRNTSTINHVGQLTEYILIDLEDANAC

SEQ ID NO: 95437 - protein, 278 aa, Acetobacter senegalensis
MIVKRIKVKATVQNQLEGIFIQQEQMFVDGVTEEVPFDGGWSPDPHEHLVAQVTDEAAAIFAAAQGNIVAMPEVDPANFENENIRALGVLVQHSTGPRLLLQEFSARQMLERRFSLILDGNTFNRLTQPAFAIGASLAGFVEGDKIKFQKFSRIKLIFNLTSLYQEATDTEVEGFCELECIDVGDIGKFKNLADQKMRKLINAITKRGTLNDFTPAQIQVAAAGENFQIAVADGKIIIPSVKAEAKALLHFLDNGLYRGPLGGEIFITNSKRALTPTP

SEQ ID NO: 95438 - protein, 203 aa, Listeria monocytogenes; identical to SEQ ID NO: 94338

SEQ ID NO: 95439 - protein, 313 aa, Listeria monocytogenes; identical to SEQ ID NO: 94339

SEQ ID NO: 95440 - protein, 198 aa, Salmonella enterica subsp. enterica serovar Typhimurium; identical to SEQ ID NO: 94112

SEQ ID NO: 95441 - protein, 325 aa, Salmonella enterica subsp. enterica serovar Typhimurium; identical to SEQ ID NO: 93783

SEQ ID NO: 95442 - protein, 198 aa, Salmonella enterica subsp. enterica serovar Typhimurium; identical to SEQ ID NO: 94112

SEQ ID NO: 95443 - protein, 325 aa, Salmonella enterica subsp. enterica serovar Typhimurium; identical to SEQ ID NO: 93783

SEQ ID NO: 95444 - protein, 198 aa, Salmonella enterica subsp. enterica serovar Typhimurium; identical to SEQ ID NO: 94112

SEQ ID NO: 95445 - protein, 325 aa, Salmonella enterica subsp. enterica serovar Typhimurium; identical to SEQ ID NO: 93783

SEQ ID NO: 95446 - protein, 198 aa, Salmonella enterica subsp. enterica serovar Typhimurium; identical to SEQ ID NO: 94112

SEQ ID NO: 95447 - protein, 325 aa, Salmonella enterica subsp. enterica serovar Typhimurium; identical to SEQ ID NO: 93783

SEQ ID NO: 95448 - protein, 198 aa, Salmonella enterica subsp. enterica serovar Typhimurium; identical to SEQ ID NO: 94112

SEQ ID NO: 95449 - protein, 325 aa, Salmonella enterica subsp. enterica serovar Typhimurium; identical to SEQ ID NO: 93783

SEQ ID NO: 95450 - protein, 198 aa, Salmonella enterica subsp. enterica serovar Typhimurium; identical to SEQ ID NO: 94112

SEQ ID NO: 95451 - protein, 325 aa, Salmonella enterica subsp. enterica serovar Typhimurium; identical to SEQ ID NO: 93783

SEQ ID NO: 95452 - protein, 198 aa, Salmonella enterica subsp. enterica serovar Typhimurium; identical to SEQ ID NO: 94112

SEQ ID NO: 95453 - protein, 325 aa, Salmonella enterica subsp. enterica serovar Typhimurium; identical to SEQ ID NO: 93783

SEQ ID NO: 95454 - protein, 198 aa, Salmonella enterica subsp. enterica serovar Typhimurium; identical to SEQ ID NO: 94112

SEQ ID NO: 95455 - protein, 325 aa, Salmonella enterica subsp. enterica serovar Typhimurium; identical to SEQ ID NO: 93783

SEQ ID NO: 95456 - protein, 198 aa, Salmonella enterica subsp. enterica serovar Typhimurium; identical to SEQ ID NO: 94112

SEQ ID NO: 95457 - protein, 325 aa, Salmonella enterica subsp. enterica serovar Typhimurium; identical to SEQ ID NO: 93783

SEQ ID NO: 95458 - protein, 198 aa, Salmonella enterica subsp. enterica serovar Typhimurium; identical to SEQ ID NO: 94112

SEQ ID NO: 95459 - protein, 325 aa, Salmonella enterica subsp. enterica serovar Typhimurium; identical to SEQ ID NO: 93783

SEQ ID NO: 95460 - protein, 198 aa, Salmonella enterica subsp. enterica serovar Typhimurium; identical to SEQ ID NO: 94112

SEQ ID NO: 95461 - protein, 325 aa, Salmonella enterica subsp. enterica serovar Typhimurium; identical to SEQ ID NO: 93783

SEQ ID NO: 95462 - protein, 198 aa, Salmonella enterica subsp. enterica serovar Typhimurium; identical to SEQ ID NO: 94112

SEQ ID NO: 95463 - protein, 325 aa, Salmonella enterica subsp. enterica serovar Typhimurium; identical to SEQ ID NO: 93783

SEQ ID NO: 95464 - protein, 198 aa, Salmonella enterica subsp. enterica serovar Typhimurium; identical to SEQ ID NO: 94112

SEQ ID NO: 95465 - protein, 325 aa, Salmonella enterica subsp. enterica serovar Typhimurium; identical to SEQ ID NO: 93783

SEQ ID NO: 95466 - protein, 198 aa, Salmonella enterica subsp. enterica serovar Typhimurium; identical to SEQ ID NO: 94112

SEQ ID NO: 95467 - protein, 325 aa, Salmonella enterica subsp. enterica serovar Typhimurium; identical to SEQ ID NO: 93783

SEQ ID NO: 95468 - protein, 198 aa, Salmonella enterica subsp. enterica serovar Typhimurium; identical to SEQ ID NO: 94112

SEQ ID NO: 95469 - protein, 325 aa, Salmonella enterica subsp. enterica serovar Typhimurium; identical to SEQ ID NO: 93783

SEQ ID NO: 95470 - protein, 198 aa, Salmonella enterica subsp. enterica serovar Typhimurium; identical to SEQ ID NO: 94112

SEQ ID NO: 95471 - protein, 325 aa, Salmonella enterica subsp. enterica serovar Typhimurium; identical to SEQ ID NO: 93783

SEQ ID NO: 95472 - protein, 198 aa, Salmonella enterica subsp. enterica serovar Typhimurium; identical to SEQ ID NO: 94112

SEQ ID NO: 95473 - protein, 325 aa, Salmonella enterica subsp. enterica serovar Typhimurium; identical to SEQ ID NO: 93783

SEQ ID NO: 95474 - protein, 198 aa, Salmonella enterica subsp. enterica serovar Typhimurium; identical to SEQ ID NO: 94112

SEQ ID NO: 95475 - protein, 325 aa, Salmonella enterica subsp. enterica serovar Typhimurium; identical to SEQ ID NO: 93783

SEQ ID NO: 95476 - protein, 198 aa, Salmonella enterica subsp. enterica serovar Typhimurium; identical to SEQ ID NO: 94112

SEQ ID NO: 95477 - protein, 325 aa, Salmonella enterica subsp. enterica serovar Typhimurium; identical to SEQ ID NO: 93783

SEQ ID NO: 95478 - protein, 198 aa, Salmonella enterica subsp. enterica serovar Typhimurium; identical to SEQ ID NO: 94112

SEQ ID NO: 95479 - protein, 325 aa, Salmonella enterica subsp. enterica serovar Typhimurium; identical to SEQ ID NO: 93783

SEQ ID NO: 95480 - protein, 198 aa, Salmonella enterica subsp. enterica serovar Typhimurium; identical to SEQ ID NO: 94112

SEQ ID NO: 95481 - protein, 325 aa, Salmonella enterica subsp. enterica serovar Typhimurium; identical to SEQ ID NO: 93783

SEQ ID NO: 95482 - protein, 198 aa, Salmonella enterica subsp. enterica serovar Typhimurium; identical to SEQ ID NO: 94112

SEQ ID NO: 95483 - protein, 325 aa, Salmonella enterica subsp. enterica serovar Typhimurium; identical to SEQ ID NO: 93783

SEQ ID NO: 95484 - protein, 192 aa, Thermococcus peptonophilus
MEEKPTLLTSLWLFLSSYIPLWIILLIQTYDGMTGFHTIFFGSLTVFSLLSLLLFLRVAKQKINVGGEKRICDDFIVIDDYQEMNHIYLEYLITYVVSMMAFIPKDQGVRNVLTFLVFMFMVFMFYLRANLIYANPVLGALGYNLFKVKNRESGHWVILITRKDKILLADKTNPERICVSSLSGNIYLEVED

SEQ ID NO: 95485 - protein, 386 aa, Thermococcus peptonophilus
MGDESERSRALARVPTIITLKKFHSRINEVRDMTVDVYLVENTGKRTKDPRAWFKTHNLVLPNKYKRKIVKLFNQRFLRVINKVSKDETEFTNFFDYNRPFSVGVVRYIEPSHIPGFWVIWNQIKQGGSVSSTSARSVKSIVGYVLDIQFKEGGRVAFFVKNRRSFILKKNSIMVGLFRKQLSIATDDYTSIPLAIDSIYFEFPDSDNDGWLLVLNTRYFESFFKYYEHYKQITQETILKLKESGLIEFENEEKIMKYALSTVTIFRTLTQLQKSKFFSFITDDGIDTGSERYKNFVNDLLDQLDVLKAKERPNLKVTEDGEHIKIKIEDKKGLKQFIEICQEKYIASVGKRSGVVKFYEVKGGVKELKQVPLDAWLWAKSEGESS

SEQ ID NO: 95486 - protein, 211 aa, Halalkalicoccus paucihalophilus
MSQRLSESEQVFRSPVRLILFISSYVPLFFIISLRLGDVKPLLIKGLYIRHFQFELVFSYVSTVIASFCIIISLILYWVMRTQSQSGVIEKTVESYQEKNELLSMYLLSYVFVFAGLTFSNTIDIVIFAVFFIMLGILQIRSEILHINPMLGIRGYHAYNITNNGRTILVISNGRIEEKIKFPENSSESSTKPSHTKIELVPLGGTTYLAP

SEQ ID NO: 95487 - protein, 325 aa, Halalkalicoccus paucihalophilus
MSSGTESIETLRDARGFADSSVDIELLLVRKQENTPDVGKLRIGADIQDKIAEITIESLNTHISKLEDGTVQARPLDIGNTVGDESVIECEQISNLPDTELFRLLDSRSDHGWTSYSEDPKPDFQFVRISEPDGKVLVGLKTYTDVTVVDTSKRLILTNKNNATEYRRVRDNLLIFEPRFSAFCYDGWIFIVKPKPFEKVFEMREEYERCGQEVIDSLEKAGITFANPDKTTSWLMSQINMMRAMYEIYENDIHTRITPDMVESSIKKYKITDRYSIEYSRNGEQIELSIGKYEDRWRLLKLLGGKFAEDDIMNSQWEIDAGRRL

SEQ ID NO: 95488 - protein, 197 aa, Aggregatibacter actinomycetemcomitans
MADSSLRLRPFVSLMLFISAYAPLMLIILIKQVDFNMPYYLNSPIVSLILLIVAVSSSVITILTAKSVRAGLMVTVSKASNKSGDMFGYTIPYMLSFMRIDLSEWQTITAIILFLSVLFIMAYRTQTVFINPILAISGYMLIDCTFKRQEKEIQAMVITREPISAGDSVCLDRLSHYLYIRSQSDYQIKRNQYESTN

SEQ ID NO: 95489 - protein, 313 aa, Aggregatibacter actinomycetemcomitans; identical to SEQ ID NO: 93761

SEQ ID NO: 95490 - protein, 198 aa, Salmonella enterica subsp. enterica serovar Typhimurium; identical to SEQ ID NO: 94112

SEQ ID NO: 95491 - protein, 325 aa, Salmonella enterica subsp. enterica serovar Typhimurium; identical to SEQ ID NO: 93783

SEQ ID NO: 95492 - protein, 198 aa, Salmonella enterica subsp. enterica serovar Typhimurium; identical to SEQ ID NO: 94112

SEQ ID NO: 95493 - protein, 325 aa, Salmonella enterica subsp. enterica serovar Typhimurium; identical to SEQ ID NO: 93783

SEQ ID NO: 95494 - protein, 198 aa, Salmonella enterica subsp. enterica serovar Typhimurium; identical to SEQ ID NO: 94112

SEQ ID NO: 95495 - protein, 325 aa, Salmonella enterica subsp. enterica serovar Typhimurium; identical to SEQ ID NO: 93783

SEQ ID NO: 95496 - protein, 198 aa, Salmonella enterica subsp. enterica serovar Typhimurium; identical to SEQ ID NO: 94112

SEQ ID NO: 95497 - protein, 325 aa, Salmonella enterica subsp. enterica serovar Typhimurium; identical to SEQ ID NO: 93783

SEQ ID NO: 95498 - protein, 198 aa, Salmonella enterica subsp. enterica serovar Typhimurium; identical to SEQ ID NO: 94112

SEQ ID NO: 95499 - protein, 325 aa, Salmonella enterica subsp. enterica serovar Typhimurium; identical to SEQ ID NO: 93783

SEQ ID NO: 95500 - protein, 198 aa, Salmonella enterica subsp. enterica serovar Typhimurium; identical to SEQ ID NO: 94112

SEQ ID NO: 95501 - protein, 325 aa, Salmonella enterica subsp. enterica serovar Typhimurium; identical to SEQ ID NO: 93783

SEQ ID NO: 95502 - protein, 198 aa, Salmonella enterica subsp. enterica serovar Typhimurium; identical to SEQ ID NO: 94112

SEQ ID NO: 95503 - protein, 325 aa, Salmonella enterica subsp. enterica serovar Typhimurium; identical to SEQ ID NO: 93783

SEQ ID NO: 95504 - protein, 198 aa, Salmonella enterica subsp. enterica serovar Typhimurium; identical to SEQ ID NO: 94112

SEQ ID NO: 95505 - protein, 325 aa, Salmonella enterica subsp. enterica serovar Typhimurium; identical to SEQ ID NO: 93783

SEQ ID NO: 95506 - protein, 198 aa, Salmonella enterica subsp. enterica serovar Typhimurium; identical to SEQ ID NO: 94112

SEQ ID NO: 95507 - protein, 325 aa, Salmonella enterica subsp. enterica serovar Typhimurium; identical to SEQ ID NO: 93783

SEQ ID NO: 95508 - protein, 198 aa, Salmonella enterica subsp. enterica serovar Typhimurium; identical to SEQ ID NO: 94112

SEQ ID NO: 95509 - protein, 325 aa, Salmonella enterica subsp. enterica serovar Typhimurium; identical to SEQ ID NO: 93783

SEQ ID NO: 95510 - protein, 198 aa, Salmonella enterica subsp. enterica serovar Typhimurium; identical to SEQ ID NO: 94112

SEQ ID NO: 95511 - protein, 325 aa, Salmonella enterica subsp. enterica serovar Typhimurium; identical to SEQ ID NO: 93783

SEQ ID NO: 95512 - protein, 198 aa, Salmonella enterica subsp. enterica serovar Typhimurium; identical to SEQ ID NO: 94112

SEQ ID NO: 95513 - protein, 325 aa, Salmonella enterica subsp. enterica serovar Typhimurium; identical to SEQ ID NO: 93783

SEQ ID NO: 95514 - protein, 195 aa, Vibrio parahaemolyticus; identical to SEQ ID NO: 94306

SEQ ID NO: 95515 - protein, 328 aa, Vibrio parahaemolyticus; identical to SEQ ID NO: 94307

SEQ ID NO: 95516 - protein, 168 aa, Thermoplasmatales archaeon DG-70
MRFWVKSLLFVSAYTPLLLIFILRYFDFHSKDFWICVTALLLANLIWVPVFRIARGWATSTFTVVKSKNRTSDALDYIIAYVIVFLGFQFEQWQDVASIIILLIVIFFVYIHSNLIFVNPLLNVFGYKIHDVEVHTGESIVLVTKEFMLVLGAHIDTKNMSDNIYLEV

SEQ ID NO: 95517 - protein, 439 aa, Thermoplasmatales archaeon DG-70
MAENIEKILEDMQERLKKASNDRVKLFFIIRTKKKIKGENGNKENKGQSTRDTEGDQSSSEENEDQSANQENQPTEEITRYQIEYEILNTKLTPNVRDTFIDIAKKNIHELLETEDLRLERYDPVAVWSRPTVEFIEMSEVEQLDKIQKDMELANLHTYVLETGKVPWAYAAKMDDAKLILFRKFSSSKILERKGWIPLFVKDGVFSRLEEPALTIDEEVDCIHDIKERKMYILNKKEFEAIFSFIEMFVQAIKAKEPLLVRTNLVNNVPLLVNRCRTDPRKARKLYSILEGQTLDQFDAQKVARINRQYVLSLGFTPTGQMVVKPKDIWRILKVLADDYLVSSATILRYEVLSKTSHLPRMAMQPKVNARTRTVTIDGNVINADKVEWDWGDGSKPEVIASPPFIPKEHPYAPGPYTITVTAYRRGRVIEKTFDVEIP

SEQ ID NO: 95518 - protein, 193 aa, Aggregatibacter actinomycetemcomitans serotype e str. SA2876; identical to SEQ ID NO: 93842

SEQ ID NO: 95519 - protein, 313 aa, Aggregatibacter actinomycetemcomitans serotype e str. SA2876; identical to SEQ ID NO: 93847

SEQ ID NO: 95520 - protein, 193 aa, Aggregatibacter actinomycetemcomitans serotype f str. SC29R; identical to SEQ ID NO: 93842

SEQ ID NO: 95521 - protein, 313 aa, Aggregatibacter actinomycetemcomitans serotype f str. SC29R; identical to SEQ ID NO: 93849

SEQ ID NO: 95522 - protein, 193 aa, Aggregatibacter actinomycetemcomitans serotype d str. SA2200; identical to SEQ ID NO: 93842

SEQ ID NO: 95523 - protein, 313 aa, Aggregatibacter actinomycetemcomitans serotype d str. SA2200; identical to SEQ ID NO: 93845

SEQ ID NO: 95524 - protein, 193 aa, Aggregatibacter actinomycetemcomitans serotype d str. SA3033; identical to SEQ ID NO: 93842

SEQ ID NO: 95525 - protein, 313 aa, Aggregatibacter actinomycetemcomitans serotype d str. SA3033; identical to SEQ ID NO: 93845

SEQ ID NO: 95526 - protein, 173 aa, Vibrio sp. 2756-81
MLSWLAKIMLTCTAIAPVGFSYAWVAWFSDKKEFAGLAIAASLFLVLVCIWVLRYAKNNLESFSFRVSSIEAADRENMAYLLLYLLPLFTASFDALNWVVWAPILIIFALITSTGYSYHFNPLLGIMKWHFYKVGTPEGVTYVLITKKELRRTSDSLLVVQLTEYIVLDIGEN

SEQ ID NO: 95527 - protein, 294 aa, Vibrio sp. 2756-81
MTTQNFFALIKDDNNNLEVKRIRVQGPLQKELVTLFNKQLQSFNEGVDTEVPFNGDWKPDPNELLVLSDVSEAKVMVDAINSNITSYHALQLSNFKSEPIKAVFTGFVDNNETTVLVQKFSSRQALSLSEIPIIKMQTGNTFVKVTEDIFTLDSKLVAVIVGGNTKFKSFHNARMVFNLSDFYQEATDTDLKAICKHASLEVANIDNFVAEADSQVRKMVHTISSTSLLDNYSVSDIQTAAQGFPNVPIAFNQGKLVLPADKRELKEVLHFLLEDIYKGPLSGSDYQTNSKRKR

SEQ ID NO: 95528 - protein, 205 aa, Vibrio sp. 2538-88; identical to SEQ ID NO: 94308

SEQ ID NO: 95529 - protein, 318 aa, Vibrio sp. 2538-88
MSKFKTWLEDFINGCDGIAVYFVDNANQIHDSDIDSKVLAKFRTAFCQDLRKKYTDSDDFEVEKLSTFEERPHTLYGYDFSPREMPLEFKLTKNVLDIKPTDTIPKYQVKANKLSGIRGAIVLLTKGISESIAFYQHIFPVSLLGPDKGVLNLTTHATRLIELESDVLKLNTKFVFMQCTHGYFVENVGVLETNLHFKKAINTRAKKYAGEILSMGLVEDTSVILDRIEKEPTYAKKLISAYKNSMVISQKIPISDMITFAQKKEYYSKYLKPSKNGKSLVVDGVTKSKRFLELLNDNFLKSELTNTEYLARSKKAFK

SEQ ID NO: 95530 - protein, 173 aa, Erysipelothrix rhusiopathiae
MLNKLSHVFFNSSIIIPYILAIGVSSLMSKESIVGLICLLISIILAISQIIFIKYLRNNLQVFKVNVTNVDDEGNNWYIASFLSYFSPFIKNLLRKEIDNYSWILMGIAAILLVLGNKTTNNPILRIVGYNSYKISTEQGKDFTLLSKRNIRKSNDVRKVIRIFEDILMEVEY

SEQ ID NO: 95531 - protein, 285 aa, Erysipelothrix rhusiopathiae
MIYVLENAGRDSTSVKMIETQREDDASIKKSLTKSIEGYKDNTIEFDGSYKPENDESLVIKNFDLPNEITEAINNPLGVSQVSVNSDNELDLKAIFVPISDDDDCEKIIFQRLPNRQILKSHNFTLFFNKHTFSCENKPGIVITDCIDAYYEYGNLYFKSYYWANQIFNLNKYYREATTDDIKDFCSNECFSIDDIDSVAESCNNWTRRKIAYILDSGVLENNSVDEIIKSAKNLNLKIDINEENKIIFPDDKDSQKELLSYLAEEIYRGNLTDGVYLTNSKRPL

SEQ ID NO: 95532 - protein, 169 aa, Aeromonas hydrophila; identical to SEQ ID NO: 94018

SEQ ID NO: 95533 - protein, 295 aa, Aeromonas hydrophila; identical to SEQ ID NO: 94019

SEQ ID NO: 95534 - protein, 169 aa, Aeromonas hydrophila; identical to SEQ ID NO: 94018

SEQ ID NO: 95535 - protein, 295 aa, Aeromonas hydrophila; identical to SEQ ID NO: 94019

SEQ ID NO: 95536 - protein, 169 aa, Aeromonas hydrophila; identical to SEQ ID NO: 94018

SEQ ID NO: 95537 - protein, 295 aa, Aeromonas hydrophila; identical to SEQ ID NO: 94019

SEQ ID NO: 95538 - protein, 169 aa, Aeromonas hydrophila; identical to SEQ ID NO: 94018

SEQ ID NO: 95539 - protein, 295 aa, Aeromonas hydrophila; identical to SEQ ID NO: 94019

SEQ ID NO: 95540 - protein, 203 aa, Listeria monocytogenes; identical to SEQ ID NO: 94338

SEQ ID NO: 95541 - protein, 313 aa, Listeria monocytogenes; identical to SEQ ID NO: 94339

SEQ ID NO: 95542 - protein, 203 aa, Listeria monocytogenes; identical to SEQ ID NO: 94338

SEQ ID NO: 95543 - protein, 313 aa, Listeria monocytogenes; identical to SEQ ID NO: 94339

SEQ ID NO: 95544 - protein, 203 aa, Listeria monocytogenes; identical to SEQ ID NO: 94338

SEQ ID NO: 95545 - protein, 313 aa, Listeria monocytogenes; identical to SEQ ID NO: 94339

SEQ ID NO: 95546 - protein, 203 aa, Listeria monocytogenes; identical to SEQ ID NO: 94338

SEQ ID NO: 95547 - protein, 313 aa, Listeria monocytogenes; identical to SEQ ID NO: 94339

SEQ ID NO: 95548 - protein, 194 aa, Streptococcus suis; identical to SEQ ID NO: 94536

SEQ ID NO: 95549 - protein, 323 aa, Streptococcus suis
MSVFDLNEVISDLVSLDQQQSFEQKIEIFLLVVKKKENEIYKQESDNRTKRVLFESLKSELEKSRFKNREVMAYDAVFSKKNTHELVNVGDYENIATKLEEFNDENKYLTSTHGMNEKKFHMYMISLKTDNHNYKVFGNFSNVLELKKKFIFGNFSDSRIEFSDSNNIVGFSKKIELLVVDDKYILINQAEAKFESVFKMNALFSGQATKILEDNEKIKSIFSDTTRNKLIDKVKSGKRMATRLIKITSDIDRFNKTVDNIKKIEEIIKDDTHTFYDKVKDVVYFEGQLTVPDGKEVQLLNAISDAFYHAIFSETDNVDESRM

SEQ ID NO: 95550 - protein, 183 aa, Legionella pneumophila
MINKLTKVMMVATSLAPILLTLWFISINSVWDNNLTFWLNIKMHYSSGIIYLISAISLMFMCWGLITIFQKKLEKIPVKILSAKTVDNEIVGFVLLYLFPLVNQPITNVNVSVLIFVSILFFIVIYVSNLYHFNPLLSFVGFHFYEVCIEGGITYVLITKKNITSCKNITRAVQLTDYMIMEI

SEQ ID NO: 95551 - protein, 293 aa, Legionella pneumophila
MDVFQNLFAIINDKNSAINRIPLTGALQSDIAHLFEEQKKEFIRDKQERAFSGSYSTGSDELFAINNYHITEQIFESIQNPISIPTLDLSNSISIKALFTGAWDDNKSVYFQSMDARKILKKGFTLINSQKTFSKLTDPGIILSNKLAAVYCNGKILFQSYHITNRFLDLSNYFREATDTELDDFISHDLFSCEDIEEFRKNADSIVRKKIALLLTNNILENITIAELETVAKEFNQLVHDENKINLKITGGRLIIPNDKKELKELIKFLDEDYFTTPFTKRKCLTNSKTYIS

SEQ ID NO: 95552 - DNA, 435 bp, Methanosarcina mazei Go1
gtgttccttatttttggtattatatactgtttctatttcgattataaatttaaagggacagcgccattacaaatagaagtacaagaaattaagaatgtaaattatgaacatatcctattcctcacaacttatataataccattattaagttttgacattagtaatataagatatcttctgttactgttcttgctattggttatcatatgtgcaatttatatacagacgaatttattttatgcaaatcctactcttgcactactgggttatcatatttatgaaatgacaggcagtagaaaaaaggaactagagactgaaacttataaaaatataatcgtgatcactaaaacaaatatatcattaaatgatgaagttcaattattatttttaagtgacaatatatattttggaaggaaatatgaacacattgattga

SEQ ID NO: 95553 - DNA, 960 bp, Methanosarcina mazei Go1
gtgacaatatatattttggaaggaaatatgaacacattgattgaaaacttgaaccatattttgagaggtactatatcaattgttgtttatttcaagcttaaaaatggtgaggtgagacttgctgatattaacaacaatgtgttaccacgcattttaacattatataaaaataaaatcagtgaagaaattattaataaagaaaatttggaattattgaaactttcagagatggatgaaagaaaaaatgttatttacaaatatgattttgacaaagatagagaaccttttttgagtatgaagcaagttgttgaggatgaagaaataaaaacattcagcatctccaatgacacattagaaaatatcgatggaattattgctaaaatcagtaattctaatcatggcatattcttgtatactaaattttaccctgtaaacttaattaagccaggtaaatcaataaacttgttcccatcagatcaccgtttagaaatgtttgatgggaaactaattcaaattacgggcaaatttgatattttaagatacaacaacgaatattatatcaaaaaacacgaaatactggagaaattttaccaatttaacgatgtaataacagagagagctaaaagttactttgaagagatcataaaaattaaaataattgagaatgaagcgaagttattttcataccttgaaaataatccttcacgtgcccgaaagttcataaaagtaatggcttcatcacttgttattaaaaagaaaattcctaaagaacagttaatttcatttgtttcaaataatcctaaattaaaagataatattgaaacaagtgaagacaagactaaatttaaattaaaaacaaataatcattgtaatttctttattaaactgttagatgatgattttttgaaatcagaattgacacaagaagaatatgaagcacttgctaagaataatgtttaa

SEQ ID NO: 95554 - DNA, 636 bp, Xanthomonas axonopodis pv. citri str. 306
gtgcgaaccgcattcgagacaatggtgtcaacgaaggaaggagccgaatgcatgcagttccagttttggtcagcggtgttgctttttctaggttcctacctgcctttggctgttattttgatggttcaagacatcgccacaaaatactggagtgcaccactatgcggttggaaagggcaatggaattgccagttccagatccttgcccattcgtggttggcgtgggggactgtagcggtgacttttggggcgttgcttttgatggtggttgcactgcgctcggttcgtctcccgcatcgcgtgcacgtgcaagaggtcaaggcgattcccaatgacctgatcaactacgtgcttccttacgtggtgtcttttatggggcttagctatgctgatccccaaaagctcggcggcttcttggtcttttgggttgtgctcttcctcatcacttatcgttctggccagattctgatgaaccctttgttgatcgtgctggggtggaagctctacgaggtcaaggtaggtttgggtcaaagcggtgcgatcaggatggctcgagtcttgaaaaagggcccgcttgtgcccagcattcagatggcggaagagatacaggacgtttatctaatgagagatccatga

SEQ ID NO: 95555 - DNA, 930 bp, Xanthomonas axonopodis pv. citri str. 306
atgaccgatcaagcattgcaggcgctacaggaattcgacctcgacagtgccggggtccatttgtgggtctttaagtccagcacgaaggcggaccggttctccgccagctttgtccgtatcgacgccgctttagaagacgcgttacgtaactttgctaaggcggaaagggcaatgatgaccgagtggattccctacggccacttggctcagcccacggaaaatggctgcctttcggtctctgcgatcgagaccgactttgccttacttcaggcgctagtggatcgcccagagctcgagcacgccatcgaaagcaaggatcagctgaagaacgcgataggctatctagtgaagttctcccaggaagagcgcgtgttgtatgcgttgcgccgctctccggctacttggaaaaccgcatatcggaggaaaggggttgtcaatatgctgttccaaaatggcgagctgagcgccgtggagggggtggatttcaccttggaaccgggattcgatctgttcgccttggacgaagcgctgcttgtaggcaacaaacgtgccttcgagtcaatgatgaggtatcgcgcaggcttcgtgaatgcgtttggtgagcttcaggacgagaagcagttcgtatctctgtttacagacatggctcctttggtcacatatgtcggcagcaatggcactcatttgcgtcgcatggcggtcatccaggaacgcaagctctacgacaatccgaggtatttgggtgcgctgcgcgaagtgtgtgaaaaataccaatggggagtgcagttcgacaaagacggactgatcattcctaccaaggaaactgctgcggtaatcatgaagctactcttggaccagcgcctgatcagcgagatcaccgccattatgtatgacgtgccaaacggccaccgcgtcgacgcggttgagtga

SEQ ID NO: 95556 - DNA, 417 bp, Pseudomonas syringae pv. tomato str. DC3000
ttgagcattttttttatgactattggcgtcctcagtcttggacttctttatgtgggttttctggcgggctggtcagcgacttacataatagaagaggtttctgatgagaaccatgagcaccttgcttttttgacaacatatatcatgcctcttgtcttcaccgacgtggacaaaaaaagaacagctattaatttggctgtgatgatatttgccattggggtcatatatgttaagacgaacaggttctactcaaacccttctctcgcggttataggatttaggatatacaaggcaaaaattaaaaacgaaccacagaaaacatttgttctcgtgtctcacggtcgattgacaaacggttcaaaaatacaatacatcaagcttgatgatgacacattgttagtcagggagattatttaa

SEQ ID NO: 95557 - DNA, 978 bp, Pseudomonas syringae pv. tomato str. DC3000
atgtttagcggccttaatacatttgttggttcaagcagcaccaccgcagaactcttttttgtatccgagacgtcagccgcacctggcgctacagtcgcgcttacatttaaccgagttaatttggactcaaatgcccaaacagacttggcctcaaactttaaggccagttttcggagcgaagttattgatatttcaacaggtctatctgttctgacaaaaatatcatctctgttcaatagctcaaataacgtatacgagtacgatatcttaccaaaagcgccgatttttgagaccatagagctcatatcgctcttgacagttagcagtactgttaattcgtttgattttgcaacacagcctttagaaaaagttaaagggatggttatcaagctcacggatggtaataccaacttatatctttatcagcataagtttcccatagctctacatagaaaaagcaagttatcgtttatgagcactcagagaaatatactaaaacgcgttggccatgatgtaattgatattaacaagaatattgatttcttcatgtataatggggtgcattatatagtaaatgtcaaaagactagaggcgtcttatgggctagatgccgtcattaacaacatggtcaaccaagtaatccccttaatagtttctttgaatgttatagatatgagcgctcacgccaaccctttagaaatatttgatgaccttaaaaagaataagtcaagcatgagaaaaattgcgaaaatattaaatggccgaattttgtctgtcggactgacaatccctcaaataatcaatgtctgtaatgatttccctgtttttagtagaggtataacttttagtaataattttgttgatcttagctcgcaaaaaaagaaactcatttttatacgaatgctcaacgacgaagcagtgcgctcggcattgaccaacgatgtatctcttgctgacgatagagagtcagccgcttaa

SEQ ID NO: 95558 - DNA, 606 bp, Methylococcus capsulatus str. Bath
atgagcactccagccgtcgctgacccctcgctccgtctgcgcccttgggcatcgctggttctcttcctgagtgcctattcgcctctgatgctgatcctcatcatcaaggactacgatgccgtcaatcccggctggctgccgcagaacccggtattcagcggcaccctgttgctggttgcggtgttcagcagcctcgcggtgctgcgttccgtcaaggaaatcgacggcgggctgacggtcacggtcaccaaggcatccaacaaatcgggcgacatgttcggctacaccattccctacatgctgtctttcatgaaagtggacttgggtgattggcagaccatcgtaagccttgtcctatttcttggcattctcttcatcatggcctaccgcacgcagacggtgttcgtgaacccgatcctcgcactggccggatacatgctgatcgactgcacattcaggcgcggcgacaaggaaatccaggccatggtcgtcacccggcaaccgttggccgtgggcgacacgtgtcggctggaacggctatcccattatctgtatgtcgccgccagagacagcagcacgccagaagaaaagcgaggcaaagcatga

SEQ ID NO: 95559 - DNA, 948 bp, Methylococcus capsulatus str. Bath
atgagcaaaccatcgcccaaggctgtgctgaaaacaatcaagggatacgaactcgacaaatggacggccactttctggctcgtcaagcgctccatggcaaaccgtgaagcgcgttatacagtgctgcgcgtcaacaccgatgccaaactgcaaaaacgtctgaagggctacataaccagccagttacagggcaaggattttcatctcgccgaatacgactacagcaacgccgacggcgacgacaccctgttcaccattgctgccgatgccaccgacttcccgcaagtcgagaaagagatcaacgctgggttcaacaacgccatcgccaaagactacgccgagctgctcaactcctgggcttatgtcatccagatcgaacagggcaacgaaaagctctttgcctggcgcaagatcagcacgctcactcagccgaagaaagtggaatcacgcagagccacctttttcgtcgaacacaaactgatcgacgtggaagacaaggaggtctttctcatcgacccgcgcttcgactttttcgtgcatgacggcacggtcttcatcgccaacaagcgcgagtttgaaacctcgatgaacttccgtgagggcatgaaggccaaggcggccgaagtcatccagaacttcaccgacagcggccacttccggcatgtcgatctcatccagaaatatgtcggcgacaacctccaccacctgcgcaagatggcttccattctcaaggcgggttattaccagcagcccgattacatccagcgcctaatcgaagtcagcaaggaagaaggctgggcgctgaaagtcgaaaacggccagatcgtggtcgaggaagattcgatcgaactgctgctgaagctcctcaacaacgatcgtctgcgctcaccgatcaacaacgaaacgtttgatgccgcagccaaagcaccggtgaagaaatcctcatga

SEQ ID NO: 95560 - DNA, 633 bp, Geobacillus kaustophilus HTA426
ttgttaattccattttggtttcgtttattatttctttttatgtcttattttcctttatttttggtactgtttataaaattttttaattatgaattccttgtttattgtattaaatattggaggtttatcgatatattgtttctgttagagattaaaacattaaatggagtaatgggacttatatcaactttgctgctggtaatttcattattatcgatattgtttatattgtttgaattaagaaccacagagaaaaaaaggattggacagaaaaaatataccattaagaaaatacaacctagggatagggatatattagtttaccttgttacttatgttttaccgctgattagtctagatatggataattttagggatataatagttttatttgttcttattcttttaatattctggttatcgatgtattcagatttactttatgtcaatccagttatggcagctctaaaattaagaatatacgctatcgaaacagatttaggtgaagcactccttatttctaaaaatgataaattcgaggaatgcttaggtaaaaaaataatttgttatcgttttattagagataaagaaacagtattaatcgatgggagtagggggcaacaaaatgaatga

SEQ ID NO: 95561 - DNA, 966 bp, Geobacillus kaustophilus HTA426
atgaatgatgaattgatttatgtaaaagaaaaaattaatgaaatggaacataacaatgattacgtttaccagttatttatagtaggttctgtactaagagaaggaacacaatctgtttatgatgattgtgatccaaaagaaattccaatcgaccaatcagtacaagattggttgttgggaaccacaaaggctttgctagaggatgtaacagaaaattatcaagtattaaatattagagaagttgacgaagaaagcgagacaataaaaagatatattgaaataaataatttaaatcaactttatttatggactcagcgtataaataatgagcaagttgaaaatgatgcaaggactttaataaatagagatgattttaaacctaaagtgttattagcgaaacttgaaattgatgatgaaatgaaggtttattttttaaaaataataaacgaaagtgtatttctaaaaaaacgtaaaatacttgaagttgtggatagaggtgattatcagatctcccaagaaagagacaagaagctttttttagacgatcaatgggacggaattataattggtaataatgttctattgtacaatgaaaataaaattttatctttgtttagatattatgaaagatttagacaagcagcagatgaaatagtcgaacagataatggaaaaagggattgtttcagatgattctaactttttacaatttgttcagtctcagataagtcttcaaaagaagctagctaaggcagctgattatgggttggaacgcataaaaagagagcgtattgaggaattgataaatactggcatgattaatttgcaattagatgagcaaggcaggatagtctgtaccacaaaagaagaagcgcgattggttattgatgtaatattagacaattttgtttcctctttaattactgatgataaataccgagctatcaataaaatgcgtatacaataa

SEQ ID NO: 95562 - DNA, 468 bp, Haemophilus somnus 129PT
ttgtcgagcgtttggcatattataaatgctagtatggtatcaataatttctactattgccttgttgtatagtataatcgtatatataaaattccagattgatcttggaagttctacagatttaccttttactattaagaaaatagaaaactcaagttacgaaaatttaacatttctagccacatacattattcctcttattagctttgactttgataataatagacagttaattattttagctattctgttgattgtaatggggataatttatatcaagactgacttattttatgccaatccatcattagctttattagggtttaaactttataaagctgatggaaattttaaaaatggggaacgcaatgacataattttaatcactagagaacgcttatctttaaatgataaagcaacctatataaagttagatgaacgaatttattatgttaagaaagtggggtaa

SEQ ID NO: 95563 - DNA, 384 bp, Haemophilus somnus 129PT
atgactcttgatagtttaaaagatgaattaaaattatataaagaaaatgaaattggtatttgtgtgtatgcaatcctaaaggaaaatttatataatcctatgagactagatattgaatcggaatcgttaaataacttaacatccctattcttaactgaaataagagatactattattaatagagatgatttatctttgatgaaactctcttcatcagatgagagaaaaaatgctatttatgaatacgatcttgatatacctaaggaactatcaactttagacttcgttttgggaaatgataacattgggttatttaacttgaaaaatcatgattttggagaaataaaatcactaattattgagataggaaataacgaaaggtaa

SEQ ID NO: 95564 - DNA, 600 bp, Burkholderia xenovorans LB400
gtgaatgtcgcatccatccgtatgagccgactcgtaaaggtcggtatgtacctcctatcgctctggttgctcttcgtgcttgtaatcgtcaataaggcggttatcgatgtcaacatctgtcttggttgttcgcttctgccttggtcagagttatcaaaaatcgtaaaagaaaaccttctgcctttagtgtgcgttgcaatgcttgcagcgtcagctgttttttatatggtctttgttaggataatctccggtgcaaaagacggcccgatcaaagtcgaagaattggaagacaagaacgcggagcacctcgtctttctggcaacctacatcatcccgttggtgggattcagtttggatagcccgagacaaatgataaatcttggaattacattgcttttgcttggtgcaatctatataaaaactgatcttttttacgctaatccaacactgtcgctattgggttttaaaattttcaatataaggtctcaaggtagcgctgcgattttgatttctaaagaggaattagaggcgggcgattccgttaatgtagttcggcttgacaaaaagattttttttgcgcgaaaggcgacgcgagtctga

SEQ ID NO: 95565 - DNA, 918 bp, Burkholderia xenovorans LB400
atgaagaccaaacaagaactaaccgacacattaaatgccattttcgctgatggcgtcaatatgaagctctactttggcttaggggcaggcgctgcgagaagctacaaacttgcggactttgacgatggcgccacgcagagagtgttgacgaactatgtcgcaggagttcgcgaatttttcgagcgtgacgaacttcagaccgtgccattatctcagctggaccagcgaagcgatgcgttggtgatgtacgacctacaggagcagcccgtcgaattcgcgcagctcgaagctttgcagaatgggcctgagccggatttcttctcattcgacgaaaatagtgtaagcgaaattcgaacaatcgcgataaaaatagcctccgttcaaagatcggtggtcttttttaagaccttctatccggtgtcccttgtcaagcgtgaccaaatactgctttataagttagaaaatcgattcaccatttttgatggcgacatcgtcaaagttactcccggattcgatttattgctagtcgacggagagttttacataaacgattttcgtaaatttgaaaaagcattctcatttacagaaatcgccgaacgagcaatgttggccgtcgtccagtcgattttggaaatgggaatcgtcaacgatgtgaaaggatatctcgccgcgtgcgccgcaccgaagcgcgacatccttcgtgcaggacaaagcgatgtccttcggttacaagccgccactatcgtggcgtttgccacacagaagggcgataagattgggcttaagatagttgacgggcaatttcacctatcttcgcgcgatagcgtgaagaaactgtataaattgctaaacgacgactacctgacctcgggacttaccgcttttgagtatgagacgcttgccaagaacaagatgtaa

SEQ ID NO: 95566 - DNA, 507 bp, Shewanella denitrificans OS217
ttgagaaactggttaaaaacaatactcttcgtatcggctttttcaccaacgctgcttgtactagctggcgtaaggtactattcaggtattgttgatgcacttctgtatcagctaatagtaatttctcttatcgggataactcttccgtttttgatcttatcttgggttaagggtcagacagaatcccttaacttcacggccaaaaaagttgaatctgccgattattatctgttggtcttcctgggaagttatgcatcgccaataataatgaaaatagcagagattgacttcggcttgatgttattaacagtgggtgtgatttttttagtggcttgggttgtttctaatattccatcccacccagttttgtacctcgcaaaatttagattctataaaatcgaatcagaaagcggcatggtttacacgttgataaccagaagagaaattagaagccctaaaaacataaccgtagtaaaacaaatatcaaacagcatgctaatggagtag

SEQ ID NO: 95567 - DNA, 882 bp, Shewanella denitrificans OS217
atgacgcttagcctttttgcattaaccagtgatccagccaaaagaattgttaaatttaacctttccaatgatgtgcaggccgaccttacgacatacctaaaagaccaagaatcctcgtttgaccttcagcaagatgaaattgtctttgatggaaaatataagcccgatgcaggtgaagttctttgtatcgagaattatgacgacattgataatcttgaaagcgccataagaaaccctactagcttggatttagttgatccgagtgaagatttttttcattatataaaggcgttattttctgggtatatactggaaactggtggagttaaagtactacttcaaaacttcgacagaagaaaaattatatctacgaatgggttatcaatttttcactcagctaatgtatataaaaaaatagagggtattggtcttaccatcgaccacaagctaaccgctacgctagaagaaggtaaattaaaattttttagcttccataataccagacagatttttgatttaagtgaatattacaaagaagcaaccgacgatgatgtgattgagttttcaaatatggatttgataaaatccgcagataatagtcaactcctagaaatgtcagattcatgggttaggcgaaagatatcactcattcagcaaagtggtattcttcaaaatgtaccaattaatgaaatgaaagctgttgctacagaatttagcattccttttattaccattaccgaaaacggcgatgaattgatcaaaatcccagacaataagtctgacctcaagaagttattgcgtttcctagatgaagactattacaaatctccactatctaaaacaaactttattactaactctaaaagagtccttggaaactaa

SEQ ID NO: 95568 - DNA, 582 bp, Shewanella sp. MR-7
atgcaatttaaaattttatcagggttcataatatttttgggatcatacttgccattagctataattctagctgtacaagatattcctattgcatggtggggaaaccctctttgtgatttatcaaaaatagatgagtgtatgtataacccgtttgaaaatccatatctatctgtaatatttattgttgttactatcatttcagtgattatttctaatgttactttgaatgaagtagatttaccatttgatggtgaagtaaaaagttctaaatctattccaaatgatattataaattacgtgtttccgtatgtggtttcatttatgggtataagttatgatactccagaaaaaatgttaggttttgtggttttcttactatggatgtttgcaattacatataagtcaggacagatagttatgaatccacttttgttaatgtttggttggaaattatacgaggctaaaattataattaacggaaatgaaagagatgttcgtgttcttaagaaaggatctctaccgccaggttattacaagtttcaatccattcaagatttttacatttcaaaggaatataattaa

SEQ ID NO: 95569 - DNA, 915 bp, Shewanella sp. MR-7
atgaatagtgactttaacctattaaaggcatttgatttcataaatgcgactccacatttatgggtgttcaaggatagtaattctcctgtaaaattcagagcgttttatgtgcagaccgaaaatggacttaaccagaagttcaagttgtttgtaaatagggaaatagccagaataactgaacactctccatattcgtatatcgcacaaacaaatgaaaatagttgccttactttagattctactattactaacttttctagtttgaaaatacttgttgatcgattggaaactgaacaccgaatcgatgatagtaaggatttggaaggcgcttctggctacgttgttaagtttgtattgggtggtgttactgtatatggaataaagagatcaaactcagcatggaaaacatcgtaccctaaaaaatatatcaacatgatttttacaaatggtgagttatccggattagaggataaaagtttttctatagaaaaaaacttcgatttttacgtgattaacaatacagcgtttatcgctaataagcgtggttttgagtcatcaatgaagtatcgtgaagcttatgaaaatgcatttgttcaattgcaatcaaatccagattttagcagtttatttactcatttagagccgattgtaaattatgtaggcacgaattcaatacaattgagaagaatggcggtcattgaaagtaaaggtatttacagtagacctaattttttattgaacctagtcagagtaaatgctgctagaggatggggacttaattttgattcaggaaataatactattattccctgtgaaaatacagttggtacaatattacaggtacttttagatcatcgattaatgagtgagataacaaataatatttatgatgttcctgatgctgtccaagtatag

SEQ ID NO: 95570 - DNA, 573 bp, Nitrosomonas eutropha C91
atgagcacgactcccggaaagacttacagcgaagggctcaagacagcacgactgctgatggtgctgagcagtatctcgccgctgtttattctctgggccattcgcggcaacagcctgatcccggatcattacttcatcggcttctgcacgtcgatggtcctgctgcccaacgctttcctatggctgcgtatcggcacggccaagcggaataacgaccggcgcgaggtgactgtcggtacagccgacgatcatcgcgaccatattctagtctacctgtttgcgatgctgctacccttctactcggaagatctcggcacgctacgcgatctggccgcgacgttcgctgcgctgtcgctcatcgtattcctgttctggcacttgaatctgcactacatgaatctgatgtttgccgtgttcggctaccgcgtatttaccgtctatccgcctgctgatggcaatccactgaccggaaaaacgcgatacgctgtcatcacccgccgtgtcagcctctcgccaaatgagaagctcaccacctaccgtctgagcgacaccgtatacctggaggctgaatga

SEQ ID NO: 95571 - DNA, 909 bp, Nitrosomonas eutropha C91
atgaatcttgcgtttgatctcaacaaagtaacgctcatcgaattcggtgtcggccgtgacgacggaaacgggcagacgtttgtggccgtaccggtggatgctaaggtacagacgactttgtgcgaaatgacgcaggcgacctggcaggccatgcagcaggataaagacggccccacaaaatatgaaccctcggacaagcacggcggtgtggagtggctctatctgccgttagccgatgatatggccgctggcatgcgcgatttgcatcaggtagtgaacctgcccatggatgcagctgcccttacctcgcccgctgatatattttgctacttcgtacggctgacggacgacgagcagcacaagctcaccgccttgcggcgagcgacccagttcaagggtatcgtcaagaacaagggacgcctgattcgctggtttgacgacaccttgcagattgtcgaagatactatcttcaaactagacagtgatttcgacctgctcattgacgaacagaatgttcacattcttcgcccgagcggcttcgagtttgcgggccagctgcaacaggcaatcctcaatgcagtgcccggcaatgtggccgtgatccaggcagaactgacttacatcgaattcgacagtatcaaacagtacgcggccaaacatccccgcgccgcacgctatctcgcctcgattcgcacgcaaaaggaaataaaggacatcgacaagacctcactcaaaaagctctgcaagagcacgggcgttgacgtctctgaatcgaacggcaaagtgatcattgctgctggctatgaaatggcgtttctgcaagttcttgaccgccgtcgttaccaattggagttggtaaaaaacaagccggaaaagtttgtggccgcaagcaggaaaccaatcaaatga

SEQ ID NO: 95572 - DNA, 504 bp, Petrotoga mobilis SJ95
ttgtttaaatcttttttgtttttgctttcgtatctgcctctttttgttatctttgccattaataattttgggaacgttttgttcttattttttagttttttttcgatttttgtttttgttgtttctttggttctttttatttctgctaagacgaatgccgaggaaaagttcattaaatttgagaaagtagaatcgcagaatgtgaggctgctggattatatttttgtttatatcttgccttttatcaatatgggtggcataaaagaattgatttcttttgctataatcgtttttattgtaggcaatatttatgtaaaaacggatttgatagctataaaccctgtcctttctttgtttggctataatatttacagagtttgtcttatggacggacgtgaaaagagtatccggtccgcttggttgatttcaaaatcaataaccgaaggaatgaaagttaaagagttttccaaagatttttatttggggatggctgacaagaaatga

SEQ ID NO: 95573 - DNA, 1002 bp, Petrotoga mobilis SJ95
atgaataaagttaattgggatgagattttaaagaatatctttttaaaagaaaatttagaatctcttagggagctaatcgctacttcaacagatttcacaatggatgtttttatccaaaatgagaacaaccagatattttggttgaaaaatgaagatccctcttttttcaagggaatttttctcacttctactgacgagtttttaaatgatttacgcgtcaaagaatcaaacaaggtagatgaatacgagacagtcattgatgataggagctttttgtatctaaaagatgtcaaagagaatgtaagcgatattggggatattgttgagattattcgtgaaggtaagtatataaaaaattattctaataaagacttggaaacaattaagaagttcaaactgatagtaaaattgtacagtaatgagttgaatgattttttgttgggtattcaatatttaacagcttccaaaatctttaaagataaaaggattttagcccttactgcacgtaaaattcaacctttaaaggaacagttttacttaattccaaaaaatagttttgattacatggttgttggagataccgtcttaattagaaatctgacttattttgaaagagatttcgggttttacaagaaatatgaagaggctaaagatgaagttatcgaggaaataaagaaaaagggaaatctatttggtaaggatattaaattaaaaagtatcgattattttagtgagaaaatcaaaaataaacctttgtatttgaagaggttttataaggttatcaaaaaaggtaattataagaaatttgagttttctaaggttaaggagataatagatgatttcaatctaaaagttaaactagatgagggtaataaatgtattgatttgggcgaagagacttctattaaagattttttacaactctacgacgaactgtattatagatctgagttgtcagggaatagaatggtggcaagtgaaaatagcccttatcaagagtaa

SEQ ID NO: 95574 - DNA, 609 bp, Escherichia coli SMS-3-5
atgtatatgagagatgatccaggtaaagtaaaggagtatgtaaggcgtaaagttgatttgtatattttatcattagctattttgttttgtttttttatttttatcacaataaagctccctgtttgtcttggtgcgcaatgtaagtctgttggctggcttttgttattgaaaaacaatattgtcccattaatctgtttagggttgcttttatattgctggattgcctacaaaagatttaaatatgacacaaacaaaagtgtagaactcccaatggaaataacaaaaattgaaaaaataaactatgaacatcttacttttttagctacgtatattatcccattgattacatttgattttgaaaaagaaagatatgtaatcgttttggcggttctcttgataataatgggggtgatttatattaaaacggatttgttttacgccaacccctccctggctttattgggatttaatatttataaattgaacgttagtataacaggtggagttaataaatcagggataatattgattacgagacggcagttaaaagaaaatgacatggttagctatatagtgcttgatgaaagagtttactattctggagattaa

SEQ ID NO: 95575 - DNA, 663 bp, Escherichia coli SMS-3-5
atgtcaccgcagaaattagataaaaaaggtttagatgataatttaagttattatattaataataaaaatgacgtttctgttatagtttatgccattcttaaaaatagcccaatagcatatagaatggatatcgaggggagtgctcaaaatggcttaaaagagttatttttagacagcctaaaaagaaatattattgataatcatgagcttggtgttttatccctttcgtcggcggatgaaagaaataatgttatttatcattacgatattgaatggccagacgagttaacttccatgcaaaatatgcttggacagcaaggagagcctgtttttgatttcaacgtgcaaaatattgaagatattagagtgttgttaatttgcattggtaatgctcaacaacaaattatactttataaaacaatggccccagtcaatattttctctcgcactggtttttttctaaaaaaatccgcaacaagacttgaagaaataaaggatgacttttttcgagttagtgataactttcaaattatcaaagtcgaaaacaatttatatgtaatagaccttaaattaatagagaaaatgttttgttttcatgatgttatcaaaaaagaagccatgcttggcactgagagatcccctcataatttccccaaagcgtaa

SEQ ID NO: 95576 - DNA, 579 bp, Eubacterium rectale ATCC 33656
ttgaagaagcaattgattattttgtcgttaagtccgttatttttattaacaatactgcaatattttccatttgagaagtttggttgtgtggttggcaatttgttcaatattcagatggtttataaacatttgccgttatatataggaatgtggatttgtttgatttgggttattgtgtctttgatcatatttattaaatttgtatgttttcaacgatatgacgtagttggaggttatgaagttaaggatatcaaagaagaaaaagatgccggattgaatttctttcttacacttattttgccattgttggttaacgatatttcgacgtggaatggtttattattgatgatttttctagttgttataataatatgtttgttgtcgaaaaccaatttatactatcaaaacccagtactaataatattgaaatataaggtgtataaatttaaatttgttgacaatgagcatttgccagatggagagtatattgcattgataagaggcaatatggatagtcgcaacacaatagagtacaagaagatagaggacaatgttttagttatcagaaaggaaggataa

SEQ ID NO: 95577 - DNA, 954 bp, Eubacterium rectale ATCC 33656
atgaataaacaagagataacatcaaaaattaaagaaattacagaaacaggtgcagtgtgcggtgttgatgtatacgtctgcttaaaaggtgaggagcagggattttatattgagaagatgatatcgatgaattccttgaaagatagaattcggtctattgctttggagattattaatacacagtatttgcaagatgaggtggtgtactgtgatattttagatgttatagataataaaaaggcagtttatgttttggagcaaagtgatgagtacaaaccatttgccttgctaaatgatgatagtatggatgaggttttcaattttgacgaaaaggacataggaaatgtccttggctttttattcaaaataaatctaaatagcaagaaattgtttatatatcagcaagcatatgtaggatccagattgcaggcaaaaaataatctaagaataatacaaaaagataatgtgtttgaaattgtcgataaagaaatgctgaaaatcgataaaagaggagagttacttatcttagataatactatattggtaagaaatgttaaggttcttcaagatttttttggctttcaagtgtttgtccgtaaccaagcacagagtgttatttccaaactggaagaattagatattattggaaatatagctacattgaaggaatatcaaactggagaaaaattaactatatccaaaaaacttatgaaagtgaagaattcaccagtgttggcaatggataaagatgaactcataaataaaataccattagttcctcgatataaaaatattatacatattgaaaatggaaagattcgtacaaatacgaaaaaagatgtcgataatcttatgaaattgcttaatgatgattatgttaaatcggaattgactgatatggagtatgatagtacgtccaaaacattattaaatagtgaaagtcaagatgagtaa

SEQ ID NO: 95578 - DNA, 525 bp, Methanosphaerula palustris E1-9c
atgaagttctgggttaatgttggattattcttaagcgcgtatctaccatttttcgtaattttagcgatcaagaattggtataatcagtatgtaacgattgtttttctcattgtagcgttgtacagttttgtgtggtttttaataatatggataattgagaaaaacacgattgagtgctataaagtagtaaaagcggaaaataaaacgaaggattctttgtcatatcttgtaccatatatcatttcttttgtaggatttgatctaactcgatggcaagacatatctgcgctttcaattcttttattaattttatttgccgtctatgtgaattcagatttattatatattaatccgatgctatctttctttaagtatcgtgtgtaccaagttgaagtttctaaaattgctgctggatgtgatgattcacgttgggatatcacattactaacgaagcgggggatcaagagtgatgatgttattcgtgtctgggatgtttctgacaatgtttttcttgaggtgaactaa

SEQ ID NO: 95579 - DNA, 954 bp, Methanosphaerula palustris E1-9c
atggatgaaattcttcaatgcataaaaaatgctgataataattatattaaactttttttcattacccggaaaaaaagccaaaaaaataaagaaattaaatacaatgtgctaaaagcaaaaattaattcggatatcagtgaggatcttaaaaattccggatccaatcagattggaagcatattgaaaaaagatcctgagtatattgactatggtattctctctgattttgacagagttaccattgaaaaaatatcaacagatgaagttccttatctttatgatatacttcgttcgatggctaatccaaatcttgatcttgttactgatgaagatcttgaacaagtgtggggttatgttgttaggattgaatgtttcacaaaaacgcttttcctatttaaaaaatacacccctaataaactacttgtgaaagggaaaaaattattaaggatgcaagatggacaattcacaaacttaaatactcaaattatcacaattgactcatcgtatgatgcagtcttactgattgagtcttctactgaaatatcacaaaagattccttcctctgatgtatttgtgttatctagagcatcatttgaatctttttttagtttcgtagaaatttataaatctgaagttgaagctaataaaaaatatttgattgaaaaatctcttttgaataacgtcactttattaattgagaattgtattaacgacggaagaaaaatacgaaaacttgctagaattattaaaaatgatcaattacaatcgataaccatcgaaaagattaaaaaaatggttcaagattataatcttgatatatattttgacgctactgggaaaatagaatttacacctgaaaagatttgggtttttcttcgaatattcgatgatgattatgtgaaatcagagattacggacattaaatatgaagtgcgatcaaaagtgaaaaaataa

SEQ ID NO: 95580 - DNA, 1170 bp, Methylobacterium extorquens AM1
atggcaaagatcctgtgcgtcctgtacccggacccgaccggcggctacccgcgagtctaccctcgcgacgagatccccatcatctcggcctatgacaacggtcaatcgactccgacgccgaaggccgtcgatttcaagcccgacgagttcttgggctgcgtctcgggcgaactcggactacgcggcctcctcgaaggccaaggccaagagttcatcgtgacgtccgataaggacggtgccggttcagaggctggaggtgcccggcgactaccgatagttcatctgatggacgggtccggtgcggccgagacggccgtccgtgcgagctgcgcttcccctcgctttgcgcttgcgggatccacatataggaacataacaggaacgaacctgccaagggtcgtgtcggacgagcactcggatacccgcttccgggttcatggaagaagccggcccggccggctgacctcgacacggttccgccgtcatgatcccgtggtgcttcaacggcatgggcggtcgagatggcttccggcaggcgtatgtgatcggaaccccgtagccatgcagctcaggatccttatcgcggcagccatctatctgggctcctacctgcccctgagcctgatcctgctcgcgcaggacctcgacctggaggcggtgaagcgggatatctgcccggtcgggtcgatggtcaccctttcatgcgccagccccctcaagaacccgttgtggtcgcttgccgccttcgccgtctgcctcgtaggcatggtcgtcacctttgtcgcccttcgtatcgtgcgcaccccgcagcgcgtgaaggtgtctgaaagcaagcacatacccgcggacctgatcaattacgtgatcccgtacgtcgtctcgttcatcagcctggactttgagcaaggcaccaagcttatcggattcgcggtcttcctcgtctggattttctggatcacgtacaggtccggccagatcgtgctcaatcccgtccttgcggcgttcggctggaagctgttcgaggtgaagtacgcctatcccgcaggaagcgggattttcgtgggtcggatgctgtcgaagctcgatatcgagcctgaccgtacctaccttcaggggcacctgcaggacgtgatggtcgttcggggcgaagagggggatgccagtcgatga

SEQ ID NO: 95581 - DNA, 921 bp, Methylobacterium extorquens AM1
atgaccacgcttccggacctgaaggctttcgatctggccgggtcggacgtgacggtatgggtgttcaggacttcgcccggcaaggacggcaagccgaggttctccggccggtgggttgggatcaccgaggagctggcgggcaggctcaaggaagcggtcggcggcgcgcttggcgtgattaccgaagtcatcgagtacgatgtcttggagcagaacaacgagggcagcgccctcacgatccagagcgatgagacttacgtgcacctcatcgccgccgaggtggcgaacgagacgcctggacggaaggcccgcaacgccaaggacttgggcaatagcaagttctgcatcatcaagttcgtccgtgacgacaaagccatgctcgccgtgagcaagaccgacacgagctggtcgacccggaagacggccggggtcatccgcgcggtcttctccgataatgagctggacgtcgaggaggcgcccgtctttacgatccgcccgaccttcgatttcttcgtgttcggcgaacgcatcttcatcaagagcaagccgaatttcgagtcggtgctggtctacaaggcggggcacgagcaggcgttcacgaccctgaagcaggaggccaagttcctcgcgctcttctcggatctcggcccgctcgacgagttcgttgggtccaacaagatccagcttcgtcgggccatcgcgattcagacgaagggtcattacaaggacgagacttttatggctcgcctccaggcggagtgcaagaacatgagcctcaacatcgcctttgacgatcaggggcggatcgtgcccaccgccgagacttgtcgcgacatcttccaggcgctgctgaaccatcggctcgaatcacggctcgactcgaaattttacgacgtgccaagtacggcaccggtcgcctga

SEQ ID NO: 95582 - DNA, 633 bp, Desulfovibrio salexigens DSM 2638
atggcaaaacttagaaatctagccccggtctttatttttattagttcatacttaccacttgcgttaatcttggttgttaaaaattttgactctactaagtatcaaagcctattaagctggcatgagctatattcacttttatcctcaaacttttggggaaattttgacctacttgaattctcgctacctgtaaaaaatcctcttttagtttgcttcattatattcacaccagcggtatcattgctaatattatgctggattttaaatgagatagaaagatgtaccggggtagagataaaaatcgaccaaacaaaaacactccccactgacatcgccaactactcagttccttacatcgcagctttcttctcattagacatcgggaacaaacttgaaataatcagcttgttaatttttttgacaacaatgtttgcaatatcctataaaagcggggcaatatttttcaaccctatgatgatcatattaggctacaaatacatgcaggcaacttacgaagataacagcataaccgttaccgataacattttatctaagcataaaatcgagataaatgaaaaagcctatgcggttaatgtttccggtattcttttcataacccaaaaggataattaa

SEQ ID NO: 95583 - DNA, 915 bp, Desulfovibrio salexigens DSM 2638
atgcaccttgaaacactaaaagacgctgtagaaaatgctgacactcattctctgtggagatataaaatatcatactcaggtggacggcaagatcgggcaaagcctgttgtcatggaaacaaaaggtaagcagtcgccagccaatttttttaatcaagccttaagtgaaagcgtttcatcattaggggaagctttaaattattctgttgagtgcgtacccggtgatgggcaatgtatgtttcaatccacaacatcaaaagcaagcttgcgtattaaaagtacaaatattcctatagcacaaaactctatttcagacttaaaagacctacaaaacactaaatactactgcgttaaattcaaaataaaatcagggtttatccatgcctttaaatggatcggtgcgacatggtcgacgaaaaatacatcgtacgcaagcatgtttataaatgaaggttctttaaaacaactcgaggaagatcattcatttagagttaccaaaaactttgatgtcatcgttatggataatatcgagtacataattaactttaatccatattcccagatatttgactataaagaaaacttactagaagttgcagattcagcctacactgagcttatagaccttggtgttctcacaagtagtgaaaagatcaaaaaatacgttggaaacaacagtatgcgattaaaaagattgtcagaggttgtagctaaaggtttttatgctcaagaaaaatttatgaagaatttaaaagccaacaacaaagaattaaaatttaactttaaatttgttggagacaagatcgaaccagaagaaaataagatatcagaactattgaccgcactaggagaccgtagacttacatctatgaatagtggacttatgtatgatgcaaactcaacccaacaagtttaa

SEQ ID NO: 95584 - DNA, 582 bp, Methylotenera mobilis JLW8
atgacagatacaagaagaaaaattgatctttacgtactttcgctagggttactttttgtctttatcttgataatgacagttcagtttccagaaggtgctgtagatttacgtcatctttcatcttggtggcgctttttaagcgccaatattttccctacaattattttcatgtgcctttgttatgcagtttttgcatttttcagatttgattttgatttgaaaggcgcaacggatatcccgtttgaggtcacgaaagttgaaggtattaattacgagcacttaactttcctcgcgacatacgtcataccgctgattagctttgaattttcaagcacaaggcagctagctgtatttgcgttgcttttacttgtaatgggcgttatctatatcaaaactgacctcttctacgcaaacccatcacttgctttgcttggcttccaaatatatagggctaacggcgcattcaaaattggtaatagagagaacattattcttatctctaaatgcaaaatagttgaaaaccaaaagctgagttacattaagttagacgatcgtatttactatgttaggggagtggtttaa

SEQ ID NO: 95585 - DNA, 963 bp, Methylotenera mobilis JLW8
atggatatacaagaattaaaagagtcgctttcgtatttttatgaacatcaagaccaaataggtgtgactgtatatgctatttccagactacccaatcaacaagagccaaaaaagctagatattgaagccgatgcacaatctggtttaaagcagctatttttaaaaagcattaaagacacaataatcgatgttgaagaattagcagtgatgaacttatctacctctgatgagagagtaaacgtaatttatgcttatgacatagaaataccacaagaattgagcgctattgatactgtgatagcgaatgacaatttgccaacttataacttagatgctgaaaagataggaaatataaaagcattactgatagaaatagggaataacgaaaagcaagtcattttatataagacgattgctccgatacatatttttagccagtcgagtttttgtttagtacaacacgaaacaagattagaaaaaattgacaaagacttcttgagaataagtccaggctttcagatgctgaaaattgatggtgagttattagtaaatgatttggctgcgcttgaaagaagtttcggtttccatgaaattattaaaaaggaagcaacgttaggaataacggcaattgaagacaaactggttattgaaaacgttgaagcattgagagagctgcttgaggacattaaatatgcaagacggtttgtaaaggtcgctaaaggctcaccagttttgataaaaaacatccctaacacaagcattatcagcttttgcaaaacatttcctgcattagccggaagaataagattcaaccaagcagaagataaaatagttttagattcaaaggtttcaaaagatttatttattaaattattaatggataactttttaacttctgacttgacgaaattccactacgaaagtgttgccaaagacagtttggataaagatgtcgctgcctaa

SEQ ID NO: 95586 - DNA, 594 bp, Prevotella oris C735
atggtgcaagatatttcaaaggtattattcacaatgactgtaactgcaccaacattcttctcactagcactaacgggaatagttaaagatagtaagatttactatgatgtgtggagaaaattttggtcagactacatctgtcctaatagttttgagtggtgggctatcaatggtagcctactatttatgttatcttgtataataggtgtttctgtctatcttaaatataaaagtagacgttttaaagaggctaagtctattgtcgctatttcctattcaaatatgtcacaccgtggaggagaacaagttctgtcatctgtaattccatggctcacggtttttgcggagaaaacagattttagaatcttatttttttgtatcgtactacaatgttgccttatcgcaattactagttacaataatagtaactacaatataatctgttcaatattaggctatagatattatgaagtacatacagaagagaatacctatatactactttctaaaaaatgtattagaaataagaatgatataaaattatatatagatataacagattatatgggtttaattattaaaaataagaaataa

SEQ ID NO: 95587 - DNA, 612 bp, Prevotella oris C735
atgtcagaatatgatatagaaggagatattcctaaaagtattttctggtatgaaaatggtaggtatttttttcaagtctttagtaaaaggaatatgttatcgcgcaagactgttttaaaagtagagtacggaaactcttttgtaaggatgcgagaaaacgcatttataattgaagataaagtcaatgctatatacgaaaatggcagattctattttcagagttatacaagtgcaaatcagattttttctctaatcgattttgtcacagaagcaactaatggtgaaatagattctttcggtaggaacgaaagcttagaggtggatacggcccaaattaagaatattggaaatgttaagactagacgcttgattaagatattatctattaccggaaatatttctacattcacaagaaaagcacttggtacaaggaaaaacctactaaagagatatggtataaatgctcgaattgatgaagaaggaaagcttattcttccaactcgtactgttgcagagcttaatagaactttagagttcttaaatgaagacattttcagaggagctataacaaatagcctatatcgctcaaattccaaaaagaaagacaaataa

SEQ ID NO: 95588 - DNA, 591 bp, Chryseobacterium gleum ATCC 35910
atgaaaaaagtaaaactaaataatatcgcaatttttgtgttgttcattacatcatatattccgttgtttggattattgattttgcgacaagtcaagcaaaatattgattatttgaattttggaggttttagtcaagaaagtgtatttctggctttagcaaaatttgggttaagcgtttttctttttcttactgcaatattcggttatatagggctgaaatttttattgataaatttagatataaaaaaatcaaatggagagcttgtaaaagtcgttgaagtagaaaacaagaatagtgaaagcatcagttacatctcaacttacattgttcccttcatcttccaagacacaaataacttatttgacattacgtcgattttcattgtcttgataatcatatttttcatttatacaaaatcaaatatgattgtaataaatccaatattgagtattactcataccctttaccaaattgattacaacaagaagagccaaacaaaaaaagctcttttgataacaaaagatgaagatttggaaagcgggcaagaaataaaaataaacttaattacgaaaaatatttattatggataa

SEQ ID NO: 95589 - DNA, 1020 bp, Chryseobacterium gleum ATCC 35910
atggataaatccattttggtcgatataattggtcaggcaagtgcggaaaacttaaagatgtattttgtcactcgtattctcaaagaaggaatgaaagctaacgcacgtgttttggaaaagtttgactttaaagtttatcagatagagattacggatgaagtaagaaactatctttatgaactttcattgaaacagttcaaaaaaattcaggataatgaagatttaaactttttcgattatgatgtcatagctgacgaaacagaacatctgtttacttatcaaatgcagaataaagttggctctttttcagacgttgtttataaccaattaaaccaaagcccaccgaaaatcacagatttaaacgatatactccaagatgaaactctttgggcatattgtgtcgagtttgaaattgacagtaataaatctttttatacatttagaaaaatatcccccggaaaagtaggagtggaaaaggaaaaagacggagaaaagaaaagcttaggcagtcagataaggactttttttgacaccaataccaatacactttcattgctaaaaagcgatactgtttatttagacaaacaaatagattgtatcttttatgaagaaactttttacgtattgaagaaattttactttgagcaacttgtcggattacaagaagaatataagaagagagcggaagacgtagcaacatcaatatctaaacatcagtgttttggagatattaagcttctaactgataaaatagaaacaaaagcttctattcataaaaagttgatgaagttggaaaaattaggaaatctaaattctttaacttctaaaaacataaaaaagttggaaacattgggtaaaaagaaaaaagcaccgataaacttaaaagatggtaaaatccaatttgaaacggaagaagatatagataatgtggtcaaactattatgtgactatttcaaaactggagattattcaggtaagccctacggaacatacgcaggtaagttacaagtgacggaataa

SEQ ID NO: 95590 - DNA, 582 bp, Pseudomonas amygdali pv. aesculi str. 0893_23
atgcagtttaggcttagcgctgcgttcctgattttcattgggtcttatacgccgctggcaatcattctcgcgatccaaaatattccattcgagtggtggtctcgccctatttgcgaacttcctaaattactggcgttgacgtgcgctatcaacccatttagaaacccgtcgctcgctattttaatggtcgcttttactgtaagttcggcatttttagcgagccaactctttaaacggatcgccttcccgtatcgcattgaagtcgtatccgttaaagcggtacccaacgaaattatcaactatacatttccctatgtagtgtcattcatgggaataagctactccgaaccggaaaaacttacaggttttttggtgtttctcctgtggatgtttgccatcacctacaagtctgggcaaatcatcatgaatccgcttttgttgattttcggttggaatctttatgaggccaatatccaaatcaatggtgtttcgcgagtggtaaaaatcctgaaaaggggatatttccctcctggaaattacaaagcacaaaccatccaagatttttatatctgcaaggagtag

SEQ ID NO: 95591 - DNA, 424 bp, Pseudomonas amygdali pv. aesculi str. 0893_23
atgcaagtgcaatttgatatctttaggaattttaactatatagattccacagtgcacttgtggattttcaaaaaaagcaccacagatcgaaagtttaacgctgcatatgtccaaactgatgagaccgtcaataccctgcttaaaaatgtgctgatccacgaggtcaatcgaaccactgaatttgcacaatactcctaccttgctcaaacgaatgacaacagttgcttggctgccccagcacttgcaacaaatttttcgctattaaaggtccaggtagaccgcccagagcccgagtgtgccgtaaattccgttgacgacctaaagggtgctcaaggctacgtggtaaaatttactcataatggccaaaccctctatgcagtgaaacgctcaacggcctcatggatgtcaacgccaactaaaaagt

SEQ ID NO: 95592 - DNA, 516 bp, Enterococcus faecalis TX1342
atgttaaaaaatattcttattaaacttaatagtattagtggaactattaaagaagagccaccttataaatggattttttttggagttattatcttcttaagtttaatttctttttgtacgattcatcgattcgttatttcaaaaagcaatcgacaattcaatataactggtaaatatgaaaaaacgggagatagtattataagctacatcttcacttatttagttcctctgctctccatggatattaataatgggaattcaataatagttaatctacttttatttatttttattggagtactttacgttgctcaagacttaatttatcttaatccaattcttgcgttattagggtttagtttttacatcaatgatgagaaaattataattaccaaattttctttagaaaaattaaaagaatttgaagaaaacggatataaagttaaaggtaacaggctaggatcatatatatatgtgtttagagaagtaatttctaaggaagattctcatatgtaa

SEQ ID NO: 95593 - DNA, 954 bp, Enterococcus faecalis TX1342
atggatattggacaattgtacaaagatgtacaaactgtttcagagttagacgacaaaaattttgaaggttctgttgaattctttttgttaacagaaaagcaaaaagatggagttcagatatttgctccagatgtgagtaacgatgttcaacgagatttacttacctttttcacaaagtattttcagaatgctcaaataagaaatagggaacagattccttatgatgtggttatgtccagacctgaaaaaaagaacttttttgtttgtgaaactagcaaatacgatggtgttaataaattttataaaaagttcgaggaagaagagcactattcttcaaccgaaggaaaaaatgttactaattttatagcatatgctttaaaaatctatctcacaaacaatgagcatgtatgctttataggtgcgtttactagcttatcgcaaataaataaaactaaatttgtaggtaacttgaaagacaaaaaattaactaaagtaaaatcggataatatgtttggtctaagtcctacgatggcgttgttaatgtataataatgaagtcgtaattaataatattccaatatttgaaaaatgttgtgaacttagtactgaatttaagaaaaatgcatcagatgttattgatactataaatgagtatggtgtcattaaaggaatcgatgagtttagaactacggcacaggatgatgaaagaattgccagaagacttacaaaaatgaatcaggatcctgagagggtaaaaagtttcttctctaatataaaatctgtaaagaaagttttaaaagatgagtcattcaaagatcgatttgagggtattgaatttatcaatggtaaacttgaatataaagccgataaaaggcaacaatttgttactctaattgctgatgctgcatacgagtcgattgtaggaaaacaaaaaagaatagatcattcgctataa

SEQ ID NO: 95594 - DNA, 624 bp, Enterococcus faecalis DAPTO 516
gtgaagatccttcataaacagaggaaagaggtgaagagaatgaggacgatacagaaaacattattttatatgtcttcttttataccactttatctgttattgattgttcaaaacttcaagttcagaaatgaatcaggaaaattttcttggcaaacgatctttgatcaaattaatttttcaaataaaattattacattattttggattggcttaatagtcatgattattctatcattatttggatgtgttatcttttttaagatttatggtgcaaaagaaggtagaaatggtagcatatcagatgcagaatttgttagagaagacactatggggtatattgtgacatatataattccgttgttatccatggatataacaagtttgagaagcttagtagttaatttactgttatttatcattatagggactttttatgttaagaacgatcagatatttatgaacccattatataatttatttgggtataatatattttctgctgaaagtggaatttatatcactaaaatatccaagcaaaagttgaaattgtttgctaaaagagatgtaaaagttaaaaagataaatataatgggagatatatacgtactgaaagaaaatgaataa

SEQ ID NO: 95595 - DNA, 915 bp, Enterococcus faecalis DAPTO 516
atgaacataggtaatttgagaaattttatttcaaatgttgaagcggatgataatgatagtgttgaaatgaaaatgattcaaaaaatagggaacggtatatggagtcatactccacagttgactatagcgatgagggaagaattaaaagttttttacactgaaatccttaataataatttttttgatttagaacaaagtgagtataatcctaatatagtaatcgaaggttcactacaagtttcagatttgacaaatgctcacatcaatgaagtattagctgaaatagatcttgaagaaaactgtaatgatgatatgggaaatgtagatttagataaaataaattattacagatttaaatttaattataatggaaatagtctttatatttttagacgattcactaaaatgaaaaaaattagaaatggtattttaggtcgttttcaggataatacatttagaaaaatagagactgatgatttttttggaatagatcgtgatattgatattttgttatttgataatgaggcactgatagtcaatcgctttgcattacagactatttttaagcttaatgattattttattgaaagagcgacaacggcgttaagcgaactagaagaagaaaacgtattagtaaattttgaagactttaaaaatgattgtttaaatgataaactggcagcaagaagaatgacaaaaatcattaataccgaaggtcgtttggaaggctttttacagaatacaagaaatttgcctgaggtaattgaacattttgatttagaaatagaattgaatgataataatcaaatcatatataacggaagtaaagaagcacgaagtcagattttattttgcatatcagatgcatattatcaatcgcttatactccaaagattaggtgaagatccttcataa

SEQ ID NO: 95596 - DNA, 624 bp, Enterococcus faecalis DAPTO 512; identical to SEQ ID NO: 95594

SEQ ID NO: 95597 - DNA, 915 bp, Enterococcus faecalis DAPTO 512; identical to SEQ ID NO: 95595

SEQ ID NO: 95598 - DNA, 510 bp, Enterococcus faecalis TX0645
gtgtataaaggttgggatgagttaaataaaaatggaacacatgaaataccgacaaaagtagttttggtttatttttcagtactgataatactaatagtattagggggaggaaccatatgttgctttttacgaaaaaatcctgacaaaacggaaaaaattcaaggttcctttagttctacaggtgacaatgtaataagttatataatgacatatttgagtcctatgttatctattgaactcgcaaacttctctagtttaataatcaatctaagtctttttattttgataggtgttttgtatgtaaaaaataatttaatttacttgaatcctgtcttattgattttagggttttatatctatgaatgggaaggtaatggttgtaagagagtaattataacaaatatgactctttctgagctaaatgctagtagcaaagaaggagactatgttaaagctagaaagtttgagaacgatatttggctctataaaaagataaaatcaaaaaagtaa

SEQ ID NO: 95599 - DNA, 948 bp, Enterococcus faecalis TX0645
atggacgttaacagcctgtataatgagataaaaaaagtagataaagaattattaagtcgttgcacgaaactgtttttaataaaacagcgtaatatgggttcgggagttgtactttacaatttaggtgtcgaacctaatgttcaaattgagttaataaatatttttaatacattttttcaaaatagtcgtactcggaataaagaacaattaaattatgatgtagtcatggatcatacaaataaaaataaattcttgatttcagaaaaagatgattacgatggtattaaaaattttattgatttatttgacgatgtgaaaccggctgatactataaaaggaattgacgttgaggaatttattgcttattctgttcatgttaagacgcctgaaggattagaattcatttttgttggggaattttcaaaattatctaaagtttctaagatgaagattgttggtaacttaaaagataataaatttaaaaaattagacacatctgatacttttggttttagtaaaaatattgctatggtaatttatgatgacgaaatattaataaatcatatacctttgtttgaaaagtgctgtcaaatggaaactgaatttaagaaaaattcagctgaagttttaaaaagtatagagtcttttaattttatcgacaatatatcagatcttctcgatactgctgaaaaagatactaggatagctagaagattaacaaaaatgaattctgatcctgaaagagtgaaggcgttttttacaaataaaaaaagagtcaaacttgtattagaagacccagaatttaaagacaaatttgaagggatagattacaatggagaaactataaaatatgataaaaaactaagacaacaatttgtaactcttatttcggatgcagcgtaccaatctattgttggaggacaaaagagaatagatcattctttgtga

SEQ ID NO: 95600 - DNA, 612 bp, Photobacterium profundum 3TCK
atgaatagaaggagcaaaacaaggttagtttcatcaatcgccattttcattagcggatatactcctttatttttaattatgattattaaagatattaaggactttgtatggtatgagaaaacattggaaacaccttttttttgggttagtaacattaaaataccgtattgggtaacagtaactaattcagacgttgtaatcactctaataatactatctataataagccttttattacttgggtatgtactgggtaatataacaaaggacccatttgatataacagtaatctcggcaaaatgtcgttctagtgaagtggttaattatactattccatacatgatttcttttgtcgcttttgatttgagcaagtggcaagacatcttttctctagcattgtttctgagtgttctttgtttactttcaattaggagtcaaagtgtctttattaaccctattttggctgctattggatatggactatatgattgtagctataacgaaggtgatcaagtaaaagaatgcgtaatgctatcaagaaatgacctactagctaatacaaaagagaaatttgttaagttaaataactatatgggaataatctcaaagtaa

SEQ ID NO: 95601 - DNA, 975 bp, Photobacterium profundum 3TCK
atgcaaagtaaactgcaaacccttgaaaatattaaaaatgtagattttggatcaatagccagtcgtttatgggtgataaagaaaaatagcagagctggtgtgaataattataaagcactatctgcatcaattgatgggttaaataatgatctagttggggcattaaaaaaattcttttgtggtactcaaaactctgtcgaaccaattagaaatttagctgcatactcagctcttactgttgatactgatgaagatagagctttagtccatagcatccaagaaactgattttttaacgattataactaaagttcgtcaaggtgcagataatgaacctgttgaaaacattcaagagttcaataatgcatgggctctagttgttgagtttacattggaaaatcatacattttatgcattttctaaagttaaaggtggctggaacctaaagcgaacatcatcagctaaaaattggattttcagtgatggtgattttaaaaaagtagaagttgataaaattttcactttcagagattactttgactttattgcatatggtgatgacgtatttattagagataaagcaaactatgaattaggacttaacattcgagaaggattagaagctaaaagagatgtccttgttgatgcattagctgagcaaggaattattacttctgtagacgatttgaaaattgctattggaaccaacaaaaccttattgaggcgactcgtagctgttgaagagactcgatactatgaagaccaacagtttattgaggaaatgaaagaagttgttgataaacatggctggcattcaaatctcactgttgatgataatggtaagtttataattgatgaaaataatattgacctcttcttaaagttaataaatgacaaaagattcatctctctaattaaaaagcagatggttgatgcagatactgttgaagttgttaagcaagaagttacggaatag

SEQ ID NO: 95602 - DNA, 618 bp, Bacteroides ovatus ATCC 8483
atgggtcaaactaatcaaatcaataggttatataggatagcagaattagtgctattcattacatcctatacacccttatttattttgattgtactcaaacaaatctcagaaaatgttacatacttaaattggggaggaataaacagagaatctattaatcttttcattgagaagtttggtttttcgttttcattaattacaatttctatatttagccttataggatgtaggtttttattttcaaattttcaaaaaaacattaacaatggagaaattgtcatcctaacagatgttcgaaatcgaaatagtgaatcaataggctatattgcaacatatataattccttttattttccaatgttttaacacgcgatatgagattttcgcattcacctttttaatgataatcatctatcgtatttatgtaaactcaaatctattattaataaacccaattttgagttttaaatactctatctttgaaatagaatacatagaacaaagaggaaagaaaagaaatggactaataataattgaggataaatacattcttgaagatacaatgatcaatatttatcctattggatacaaacttttcttcgctaaaaacagagaataa

SEQ ID NO: 95603 - DNA, 1017 bp, Bacteroides ovatus ATCC 8483
atgacactacaagaaattttagacaaggttagcaccaccaatgtcaatgatcttcgcttatactttatcactagagtattaaaagataacataaagaaaagtgcaaaaatcatagacaaatacctctttaaagtttatcaagttgatattgatgatgaaattagacaatacttgtatgatttatctattgaacaattagataaagtcataaaaaaaaactatgaaatacttgattatgacgttataagtgatgatactcagcacttatttacttattctatgcaaaataagattttctccttttccgacgtagtttgtaatcaactcaataccactcctccaaaaatgcagagcattgaatctatcttatcaaataaagatgaattgtgggcttattgcgttggattcaatgattctgaagaaagagattggatttacacttttagaaaaatccaatcagggaaagttgccatagacgagaaagaaaacaaaagtatactaaaaacaattagaacctattttgatacatcaaatcaaaaattagaactactcaaaggagagacggtaaatttagacaaacagatagactgtatttactacgatgaaactttctatgttatcaaaaaagtaaatttcgaacaaatagttggactacaagaggaatataaagaacaatccaaaattgttgttaacgaattaagagaaacaggaaaatttaatggattagaaatgattgaagaaaaaatagaatcaacaccatcaatacacaaaaagctagttcgtatcgcaagaatcggaaactataggactatagatgacaagataataaagaaaatgaaaacagtatgtaatagatatggtgttaagctcaatgttaaagaaggaaagcttagcattgaagaagaagcagacattgatacaatattaaaaatgcttgctgattattataaaacaggagaagtttcaggaaaagcatacggaacatttgcgggaaaagaactagtaaataagcaatag

SEQ ID NO: 95604 - DNA, 702 bp, Clostridium bolteae ATCC BAA-613
atggaacatatatatggtgtaaggaatcatgttcatgcaaaaaacaggaggcaagaggaaaccatgggggaacaaaacttactactgaaaaggaagcttgtcattcagtccttcctgccgctgttcatttttatttttatcagatactttgattacaggatgatatcatccatatgccatttcatccgtgaattgatgcagaggaatttcagtgtcatgaaccggatatgggaccatccataccttggtccatttatcgctgcattcatttcactggcatgctccctttacggcataaccgccatgtggcagtttaagagcatgcagatgtccggatttgtggatgcaggcgaagaaatcgtgattgaagaagagataacggattccggaatcacatttttcatgacctttgtgctgcctcttttgctggacgatgtggaaaccttaaggggcttcatcatttttaccggtattttagggctggtcatccgtttgatgtggaccacccatttatattatcaaaaccccatattgactctgttgggctacaggatatataaattccgcttcctcaatcctgtcatggacggctgccgggataaaaccatgattgcagtgtgcagaacaggcattgcagagaaaaaaatagtgaaatggaaatatatatcggatgatgtctgcctgatgtacaataaaaactga

SEQ ID NO: 95605 - DNA, 1029 bp, Clostridium bolteae ATCC BAA-613
atggaaaacaaaagagaacacagcacgaaccatgctaccccaaaaacgccaaaggaaataattgtaaattcattaacagaactgtttgcggatgatgaatttgggtttgatatgtttatcatgatgaaaaccggggatccccccatgaagcatttcgctttttatgagggacccactggcagggaacatgattttaagctcaaagtccaaaactccatcgtcaagagtatcagagatctgtttcttgatgaggaggctgaatatgcaatggcggaacaggcagggggcaatcagaatattttttacatcataaaacagaatgacgattataagccgtttgaacttctgaataccccggaaaagcaaatgggtcctttcttcatggatgacagggacaaggccgatgcaatactcttccgcttcagaaggggcgttcacagcatctgggcttaccagtatatacttcccgccaccattcccaataagaaaaaccagcacttttttgcccggatattagatacggaacagactgattgttttgtggaaatgccggaacagctctttgtaatcacaagaaaagtagatctgctcgtcatggatgacaaaatcatcaccaaagatataggcctgatgcaaagacatttcgggttcaatgacttcatcaaggcatcagccaaaaaagcggtgtctgatatttcagatatccgtctggtgactaattgtgaaaaattaacggcatatatcgagcggaaccagactaaatattcccgcaagatgatgcggattaaacactaccatgtggtggaaaagacagcggaggaactgatacagataatcaatacagtcccccgctggcagggagtatttgatatccgtgacggacagatttatctgaggacctttagggatgtggaaaacctgattgatttattcgatgaaagatatacggtttcgctggtgacgggggatgaatttgatacggatgtaaaaaggctggctgctccgggaggaatgggaggggaggattaa

SEQ ID NO: 95606 - DNA, 591 bp, Alistipes putredinis DSM 17216
atggtaagttttatttctaaatttttgttcactgccacggtaacagcaccaacattcttgtcactgggattaataggtgttattaaggatagcacgaattattttcaactatgggatgatatgctagaaaataagatatttcctactagttttgaatggtggggcatcaatattagtttcggatttatgttgatatgccttatcggtattaaaatttttctttatagaaaatccaacaaacacaaggaaggaaaaaccattcaagtgaaatcttattcaaatttatctctgaacagtgcggagcaaataatttcatctataatcccttggttaacaatatttgccgacaaacttgattttatggtattatttgtttgcataatacttcaatgctgctttatcgcgattgcaagttacaataacaataactacaatttactttgttcaatatgggggtatcgttattatgaagtatatacagaagaaaatacctacatactaatttctggaaaatgtatcagaaataagaatgagattaaaaagtttattgaagtgacagattatatgggtttaataattaacgagaaataa

SEQ ID NO: 95607 - DNA, 852 bp, Alistipes putredinis DSM 17216
atgagccaattttatgcattgatgtccgataatacagtaaaacacatttctcttaaagaagagatagtaacagagattaaaaatatatttataaatggaggtgctatatttaaaccagaaggtatagaagaagatgttttcgatggcaatatcattagccggaacggggagaatataacatatgtacattatgacttacctgaagattttgctcgcataccatataatcaggctgatatgtctgaatacaatataaatgaagatatgcctaaaagtatcttttattacgatgacggaaaattctattttcaggtctttaataagagaaacatgttacaacgaaaaatggtcttgcagtttgaatgtggaaatatatttgcaaaaatgaataactctgcttttattgttgaagataagattcatgcactatatgaggaggggaaactgtattttcaaagttatacagtcgcaaatcaaatattctcactaatagattttgttaccgaggctacaaatgctgaaattgaatcctttggagaaatagatggaattaatgtaaatactgaaagtataaagcatattgcaaatataaagacgcgtcggcttataaagttgttatcgaatacagacaatatttcagcttttatgagaaaagcacctcgaacaaaaactagcctattaaacaaatacggagttaatgcacaaataaatgaaaataaagaattggttttaccgacaaataatgttgcagatttgaaccgtgttttagagtttctcaatgaggatatatttaggggtgtaattaccgacaggctttatcgttcaaattcaaagaaaaaagataatcactaa

SEQ ID NO: 95608 - DNA, 672 bp, Clostridiales bacterium 1_7_47FAA
atgacacatataaagggcggtgttattatgcaagcagagaacttgaacttaaaaagaagtttaatactacagtcttttgcaccactttttttgctgttaaccattaaacatttagatattgatttatgctggagattacttcataaatttttttctgtcctttttagtagaggggcagttgcattttcaattgcattaaagcataatttatttggtgaatttgtgatttcaattatgggtatttgttggctggttcttaccataattgttgcttgtggatttaatggtatgcaaaaagctggatttaaggcggcaggcgaaaaaatattaattgaagatgagcaaagtgataatagcgcgacatttttggtgacatatgttctgccacttttaacggatgatgtagaatcttttagaggattagtggtttttttagcgatgcttataatggtgattatgttgttaattagttctaatactttttatcaaaatccggttttggcagcaatgaaatatagaacattttcatttaaatttttgaatccagaaaatgatattactcatccggatagagtatatgttggaatcacacatggacttttagtagatgaagaaacagtgataaaaagaaaatacatttctgacggagtctttgttatttacaatgattaa

SEQ ID NO: 95609 - DNA, 990 bp, Clostridiales bacterium 1_7_47FAA
atgccagaagaaactttaaatgaagaacaaataagaatgaaattaaacgatttttatgataatatcgcacaatgtgggttagaggctttcgtagtaaagaaaaatgcacctaagttaaaaagaatgtcattatcggaagcgtgtaatgatcaaggaaaaaatttcagaacaattctaaaagaaatgtttgttaatattcttaatgaacagtatctgtcactagatgtagagtatgcggatggacgacaggtggctgataatcaacataagaatttgatttttgaacagggagaaagttttcgaccattctcatttttgaatgatgaggctgaaaagggtgaatttgtttcagaagatttaacagaggcttctggtcttgcatttcagctaagaaaaggagaaaatactgtttggttataccagcatctttggagtattatggtgccgaataagaaaaaaacaaatcttatggctaggttgatgcagtttgagaatcaagtagtgttttcggaacagagtgaaagcttgcttacaatagcaaataagatagatattttaataatgggtgacgctctgataacaagtaatgttacacttttacagaaatattttggatttcaggattacatttatcagtctgcgcagcgtgcggtacagagcataattcaaaagagccttgttgcaaataatgaaaaattgatggagtatattagcagaggtaaacccaaatatgccaagaaaatgatgcgtattggaacatccaaagtattgactttgacgcaggatcaactgattgaaaaaattaatactttaacgagatggcaggggaagtttaatgttaatcaagatacaaagcaaatcacattaggtacatatagtgaagtggagagcctgattgatctgtttgatgagagatatactcgttctgatgtaacagatacggagtatgatacagatgtaaaaactgttgctaagccagtggaagggtaa

SEQ ID NO: 95610 - DNA, 585 bp, Providencia rustigianii DSM 4541
atggaaaataaaaaaatattaaaatacttgttatatgtattatcattatggcttctttttttatcgctatttattatgtcatatgataagagcttatttttgaatgctttcaaagactggcattcactttctatctttgaactaaaggcgaagaattttgtttttatatttagctttgctttcatgatgattggtgtttttatttatttttatctttgcttttctttcatgagcggctggtcaattaactgtactgtcgatagcgtttcaaatcaaagtcatgagcatttagaatttctcacgacatatgttatgccccttgtttttacagatgtaaatagcaaaagaacaatgcttaatttagttataatgataatcgtaattggtcttatttatgtaaaaaccaatagattttattcaaacccttcactggcgttactaggttttaaaatatacaaaggaactattcgcgatcgtggcgataaagagttcgtaatcgtatgtcacggggaattaaagaatggctctatcatcaaatatataaaaatagatgatgaaacatgtatcgttaaaattatcagctaa

SEQ ID NO: 95611 - DNA, 978 bp, Providencia rustigianii DSM 4541
atgttcacacagatagatagtatcttgcagtcacaaaatttatcatctgaagcattctttctggtagatagtggctctggtggttttgatttacgcagagtgactctagaaccagcagcagaagctagtttaacaacctcttttaaaaagaccttagaagataaagtcataaaaccaaactcaggtgctagtagtgtgccattagtatctaccctagttgataggggtaataaggtatttgagtatgaccatcagacactgaatcacctacctgttgagttcactaagatttctgacgtactaaaccaaggtgttttatctaacaccccaaaatttgatttttctacccagaagttatctgatgttaaaggctttatataccatctgtgtgatggtgcgggtaatagcattgttgtttatcagcataaataccaagtaactatgcacagaaagacaaaggcatcttacttttctctaaatggccgaacgttagataaaatagattacgattcaattgatataaatgggaatattgatttcttctattttaatagtacgtactactgcattgacattaaagtgctggagaggaattatggactcgagcaagtaataaataacatggcgagccaggcaataccatccattctaaatttaaatctattcgattgttcaaacattcaaaatcctcaagatatcttcaaagatatgtatcatgacagatcattcatgagaaggttgtcacagataagaagtagtactcttgtttctaatggaagtatcaccatccagatggtagatgctgttagacaaaaattcccagtattccagaggaatttgaatgtaacaaacgggtttatagatatgacaactaaagagcacaagcgatactttatccggctactaaacaatgaagcctcttttgctgctttaaatcaggaaccattcctcgccgttgataaagattccgccgcataa

SEQ ID NO: 95612 - DNA, 552 bp, Corynebacterium pseudogenitalium ATCC 33035
atgacagtggcccgctaccaagagtcgcccaaaacccgactcttcctcttcgtctcatcgtttgctccagtattcatcatcgcagggttgcggctttttgctgctcagcggatgctggcggtgctgttactcgtcggcggcgtagtaactttccttctcacgccactagtgctatttacacgccgtaaggcagggaagcaggaattcgtggtttctaatgttaaggatgaaagttctcaaatccctacatacttgattactttcatcttccctttcctgtttttatcagaacagatgagcgcttccttagtcgcggcctatgtaggatttgctgcactcatggttgctcttctctatcgcacatctttaatattaattaacccatccatgctgatagtgggctatcgtgtcttttcagttgacattgtaggacaaggtggtgcctacatcatctccaaggaatcaccattgccctcgcaatccacttatactaggagaattgctgacgggctcttcattgctgtggaggagcccacaggccaaacaagttaa

SEQ ID NO: 95613 - DNA, 948 bp, Corynebacterium pseudogenitalium ATCC 33035
atggacaaaagcaccgctgatgaacttctcgattttgtggatttgacgaagccagtccgcctcattcttggttatcgatcaaatgacgacaaggtctctctgagacgagtggctctcgcgcaggatgctcaagatatgtttgcggaaattgcgagtgaagtacttgaaaatcggaagcagagagatcctgaagattgggagccagcccgtcccgtatctaaggagacttatctcgtcaccacgtgtgaggcagtcggagaggtgcctcaggtctcgaagtcaaaagtgcaaccccttctagcggctttgattgatactcaagatatagtcgagacggaggggaagaccctcttaaaagcagatccatacttttacgctttccaatttggtatcggatcagattctgtaactttcctgcgcaagctcaatcctttacgtggactacgcaaaaagagactaggcttcttggatgacgagctgagtcttgcgcatcatacagtcttcgctttcgactcttgtgtggacctgatcattacaaaagagcacttaatcgtgttcaaccagactgcctttgcttccatctttcgagggcagaaagaacttaaaaagatggcgaaaggctggatcaatgggatcagggattcaaccccgatgacgcaggaatcttatgatgtccttctggcgaagggggtacgtgactctcgggcagccaagcgtatagaaagcatcgcacgtagagggcacctcgcttctctagatgcttctgaccttcgggagggtatggaggaatgcgatctcaacccctcggtttacatgaatcaatccggtgagcttgtcttaacggcggatactttgttcgatatcctcaaatttttaaacgaagatatgtttcgtggtgtcttaactgacgccccctacgaagtagatagtaaagctcgtcgaaattaa

SEQ ID NO: 95614 - DNA, 585 bp, Enterococcus faecalis Merz96
atgaggacgatacagaaaacattattttatatgtcttcttttataccactttatctgttattgattgttcaaaacttcaagttcagaaatgaatcaggaaaattttcttggcaaacgatctttgatcaaattaatttttcaaataaaattattacattattttggattggcttaatagtcatgattattctatcattatttggatgtgttatcttttttaagatttatggtgcaaaagaaggtagaaatggtagcatatcagatgcagaatttgttagagaagacactatggggtatattgtgacatatataattccgttgttatccatggatataacaagtttgagaagcttagtagttaatttactgttatttatcattatagggactttttatgttaagaacgatcagatatttatgaacccattatataatttatttgggtataatatattttctgctgaaagtggaatttatatcactaaaatatccaagcaaaagttgaaattgtttgctaaaagagatgtaaaagttaaaaagataaatataatgggagatatatacgtactgaaagaaaatgaataa

SEQ ID NO: 95615 - DNA, 924 bp, Enterococcus faecalis Merz96
gtgttacaaatgaacataggtaatttgagaaattttatttcaaatgttgaagcggatgataatgatagtgttgaaatgaaaatgattcaaaaaatagggaacggtatatggagtcatactccacagttgactatagcgatgagggaagaattaaaagttttttacactgaaatccttaataataatttttttgatttagaacaaagtgagtataatcctaatatagtaatcgaaggttcactacaagtttcagatttgacaaatgctcacatcaatgaagtattagctgaaatagatcttgaagaaaactgtaatgatgatatgggaaatgtagatttagataaaataaattattacagatttaaatttaattataatggaaatagtctttatatttttagacgattcactaaaatgaaaaaaattagaaatggtattttaggtcgttttcaggataatacatttagaaaaatagagactgatgatttttttggaatagatcgtgatattgatattttgttatttgataatgaggcactgatagtcaatcgctttgcattacagactatttttaagcttaatgattattttattgaaagagcgacaacggcgttaagcgaactagaagaagaaaacgtattagtaaattttgaagactttaaaaatgattgtttaaatgataaactggcagcaagaagaatgacaaaaatcattaataccgaaggtcgtttggaaggctttttacagaatacaagaaatttgcctgaggtaattgaacattttgatttagaaatagaattgaatgataataatcaaatcatatataacggaagtaaagaagcacgaagtcagattttattttgcatatcagatgcatattatcaatcgcttatactccaaagattaggtgaagatccttcataa

SEQ ID NO: 95616 - DNA, 594 bp, Citrobacter sp. 30_2
atggatagcaggccatatcttaaaacagtactatatatactatcactgtggcttttatttttatcattattaattatgtcctacgataaggttttgataaaaaatgtgtgggactatattttcacggaaaattttactctctcaatctcgtcattgaaagtgagaaatatcgttttcatagttagtttgattttcatctttattggtgcaattattttaatagtccttgcaaatagctttggttcgggttggtctgttgcatgcactgtctcggatatcagcaatgaaaaccatgaacatttagagtttttaaccacttatataatgcccttagttttcactgatgtcgatagtaagagaactgtattaaatttaggattgatgatatttgtaatcggcgcaatatacgtaaagacaaaccggttttattctaacccatcacttgcaatacttggattcagaatatacaaagctaatgtccatgaccgtggagtgaaaaaatgcacagtaatctgccgcagtgttctaaagagtacagataatataaagtatataaaaatcgacaatgaaacttatttggctaaaatagtgtag

SEQ ID NO: 95617 - DNA, 972 bp, Citrobacter sp. 30_2
atgttcactaacattgaaaatatttcaaaatcgaaacgcatctctggcgaagctttttttgttgctgatgttcaaggtacgatagatatatttaaggttaaccttgaacctaatgctgaaaaagatctgaccacttcattttctaaaagcttaatcaataatattattgaacctaacagaggtaaagtggccgttccacttgtatccactttattagaaagagataaacaagttttcgaatatgatcacttagcaattaatcatctcccaattgaatttactaaaatgaacaacgtgctaaatttcggtgtcaatgggaatgcaacacagtttgattttgcaacacaaagcctcacatcggtaaaagccgtaatttaccacctttgtgatggtaatggaaacagcgtagtcatttaccaacataaatatcctgtttctctacataagaaaacaaaaaagtctttcttgagtctaaatggcagaaccttagataagatcactcatgacagtattgatataaatgacactattgacttcttcttttttcagaataagtactatgcgctaaacattaaacttcttgaaagaatgtatggattagaaagtgtaatagataatcttgcaaataactcaacgccattaataataaaccttggaattgttaatacacaaggtatgccagtaccactagatattttcaaggacatgtataaagacagagcatttatgcgtagacttgctatggtttcaaaagggaacttagtaaaaacgggagtttcagtccctcaaatacaacaagtcatgcaaaaattccctgtatttcaacggaatattgatctaacaggaggattaataaaccttaatactaaagatcaaaagagatactttatccgacttctaaataatgaagcatcttttgcagcacttgataactcgcccttcctggctgttgaaaaagactccgctgcttaa

SEQ ID NO: 95618 - DNA, 537 bp, Escherichia coli D9
atgctttttgtttttatcattatcctgactgccaaaatccccttttgcttcacatcggattgtagcttcataggtttaaagaaacttgtattaacaaatattgtccctattgtttgctttatattttttctatttagtatttatttttataaaagattaaaaaacataacaaaatacaatggacaagatagtgttaaaataacatcatgtcaaagcgaaaactatgaaagcttaacattcttagcaacatacattgtaccttttatgggctttagttttgaagacatgcaaaaaaatatagcatatcttttgcttgtagtagtaataggcattatttttattaaaacagacaagtattatgcgaatccaactttagctctgtttggctttaaactatatagggtaaacatactacacccaggaagcggagagacaaaaaatctgatagctatttcaaatgatgtattaaaagtggacgataatgtttattatagtttctttgatgaatttgtttttatagcaaggaaaaaagtatga

SEQ ID NO: 95619 - DNA, 564 bp, Escherichia coli D9
ttggctctttataaaaataaaactaaccttgcggtattgagaaatagcagaaaaatgtttaatttagtccctgaccctgatggatacttgaaacaactccctaatgagatattacggttagatttcaattatgatctattttcaattgatgaggatttttacattaaaaatcacaagacacttgaaactcaaatgaaatttcatcaagtgattgaagcccaagcagttattgctttaaattctttaaggaattcactactaattgaagatatatcaggtttagaaaagagttcgagagaaatttcattcgctagaaagttggcaaaaatctccaaacattctcctgttttggggaaaatagatactaaaacaattatcgattatgtatcccaacataaatatttatctacaatacttcagattaatgaagcgggagataagttattaattaaaaccaagacatcacagaagcatttcattaaactcatgagcgatgattatttacaatcagatctaaccaaaataatatacatgagcatagcaaaagacagattagatgaatag

SEQ ID NO: 95620 - DNA, 582 bp, Lactobacillus salivarius DSM 20555 = ATCC 11741
atgaaaaatgactatatttcaaaatggtttttgtttattacatcgtatctaccactatatatatggctattactaagtaacattaattatgtcgaactattgaaactaaataaaaaagatttagaaatatctactaaaaaattattttattttgttctggtagtatttattattatttctatcgttgagttaatccaattatttaaaagtagtggatctgagataaaaaaaataccgaaagaaatggaggcaactcctgaaagcgatggtttaatgaattacatagtaacttatataactcctcttgtatcatttgacttgagtgatataaaatctgttattatgaatatagctttatttttgttgataggcttaatgtatgtaggcagtagtgcaacatatttaaatccggtactaggtatatttgggtttaaaattttcgaagtttctggctttccacaagttcaccatattatttcaaaattttcatatgactatttagaaacaataaaaaatagaggagatgaagtgattagttatcatttaggagatggtatttgtattataaaatctaaaaaataa

SEQ ID NO: 95621 - DNA, 963 bp, Lactobacillus salivarius DSM 20555 = ATCC 11741
atgaaagattttaggttagatgaatacataaacgacataaatgctgtatatgaaacagaagaatttattaaaagaacagaaatctttttaattaaattggataagaaggtaagcgaaatatataaacaagacagcggtgatgatagtaaaaaattactattagacgctttgatagaaaaattaaacgaatcaagatttaaaaaaagagaagtagtatattacgatgcagtcactaataaaaagaatactcatgaattagtaaaagttgacgattatccaaatattaatgagaaattgaaagagtttaacaatagtttatctagtactaaaggtcttaaagaagataaatttcgattatatgcaatgaccttgaaaacgaataagcataattataaaataattggaagtttcacaaatacttttgcacttaagaaaaaatttttaattggaaatttttctgattcaaagattaaattaaatcaaagaaatgatattattggtttcaataagaagatagaattatttgtcatagatgacaaatatatattaataaatcaagctgaatcgaaatttgaatcattatttaaaatgaatattttattttctaatcaagcgacccaaattttaagagaaaatgataggataaaagaaatttttgatattgaaacatgtgataagttaagtaaaaaggtagaacttggtaaaagaatggcaacgagacttataaaaattgtcagtgatactgatagatttaataagacaatcgataatattgataaaataaaggatattattgataataataatcacaaatttcatgaaaaagtgaaagatgtaaactatagaaatggaaaattatctgtaccagatgggaaggaagttcaattattagatgcaatatcggatgcattctatcaagctgttatttcagaaacagagaatgtagatgaaacgaggatgtaa

SEQ ID NO: 95622 - DNA, 570 bp, Acinetobacter junii SH205
gtgagacagaatatgagtactcagcagaatgaatcactaggatttatacgtgtaatgatggtgttaagtagtttttcaccattatttattttgtgggctttaagaggtaacaaagaggtatcagatctataccttatccctatctgtgctttctttgtcattattccaaatatatttttatggcgaaggattaccgttgctaagaaacaaaatgataaacgtacaatcaaagttggaactgctgatgatcataaagaccacatcttagtttatttgtttgctaccttattaccattttattcagtaggcatagagagtttacgagatgtagggacgacattagttgctttggtttttgtgattttcttatttttgcatttgaatttacattacatgaatattttatttgcattacaaggctatcggatttttacaatttgtccgccagaagataataattcaatcagtggtaaaacacctcaggtattaattacaaaaagagccatcgtactgaatggtgatgaaatcgttgcgtatagattaagtaatacagtttttttggagatttag

SEQ ID NO: 95623 - DNA, 906 bp, Acinetobacter junii SH205
gtggttgtagattttgactttgataatattgagaatattgaatttggggtggggagagaatcagaagatcaaaatcaacagttttttgaggctgtgcctgtagatgtgagcgttcagaaggcattagttgagatggctaaggcaactgttagaatcatgaataaaagtagtcctagtcctagtttatatcaaccatcagaaaagcatgctggtattgaatatttatatttgccaatttctgatcaaatggcacaaacaatgaaagaattgcatgaagctactaacttagccatgaattctaaagtattaaaaaaccctactgaagttttctgctatttcgcaagatttacagataaatctggtaagaagctaactgctttacgcagagctattcagtttaagggaatattgaaaaataaacttattagcctatgtgatgacacattaaaaattgttgaggaaaaggtatttaaactggatgctgactttgattttctaattgataattctaatattcacataatccgaccgagtgcttttgagtttgctggtaagttgcaagaagctattttactagctgtgcctacaaacatttcatctattgcagctgatctcggttatgtcgattttactagcatacaggcttatgctgaaaaaagacctcgtgcagctcggtatattgcatctattaaatcacaagctgaaactaagaatattgataaagatcgtttgaaactgttatgtgaaaatacaggggtttctttaaatattcagaatggaaaaatctttgtgaatgaagggcatgagctaggtttcttagaggttttagatcgacgtcgttatcgtttagagttaatcgacgggcaagctgagaatttcaaagcatcgagcagaagtaagttataa

SEQ ID NO: 95624 - DNA, 558 bp, Prevotella sp. oral taxon 299 str. F0039
atgtcattgggattattgtttggatttttattaatcaaagcaataaaaattccaatatgttttgatgatgatgctaagtttataggctgttacaacttgataaaaatgaatataccaacattggtttgttttttttgtcttattgctgagtatttttgtgttaagcgctttctgcatagtttaggcggatcaaaggatttgccttgtactataaaaaaaataaaaaatgggaattttgagtaccttacattcttgacgacttatataattccattggtttgttttgatttaggaaaacctaatgagtgtattttgttagttgtcttattaatcctgcttggtgtcatctttatcagaacgaatctatattatacaaatccagcactatgtatattaggttttaatttgtatgaagcagatattgagtataaatctaaaatattatcaaatctaaaaattttgtcaaagattaaattaaaagaaaatgataaatttaaaaaattcgatttggaatttaatgaagttatatattgcaaagaattaaatgcgcatgaataa

SEQ ID NO: 95625 - DNA, 951 bp, Prevotella sp. oral taxon 299 str. F0039
atgaataaagaagaattaaaagagatagtgcagctatctattaatgagaatgctggtattgaaatttttttagggcttaaaaatggagaaattcgaaaagcgaactttatagatgaggttcaaaaagaaataaagaaggtttttattgatgatatagaaaaacgtataattgaatctgaatacccaatcatgtgcttgtctagttcagatgaaagaaaagatataatatatcattttgattatacctccctcccagacgatcttaaattctttgacacagtgttagatccgatgatagatattaaaacattttcttttgtagacgataaactaagtaatatcgatttctttttattcctaattggagatgaaacaaatcaaatattattatataagcaattagcttcaatcaatatttataaaaagaacactggaatattcgtaagaaaagcagataatgagtttgcaagggttaatgatgattttctgagaattgtccctggatttgaaatgtttaagataaatgaagaattatatatattagatttaaaatttttagaaagaaagtttaagatctatgatgtaatcagatcagccgctgtaaaagaaatagaaaagattaatgagtatggaattgtacagaatgctgaaagtttaaataatcttttgaaagatacatcatttgcaagaaaactttctaaaatatctgaacattcccctgttttaggaaaagtctctaataatgctattatttcttttacaaagaattatccaagcttgaaaaatacattcaagtatacagatgatgattcccaaataatacttacaactcaaaaatcaatgatgactttcattaaattattaaatgatgatttccttagttctgaactaacgcgtaattactatgatagcattgcaaaagatgtacttaaggaagatacaatatcataa

SEQ ID NO: 95626 - DNA, 516 bp, Klebsiella sp. 1_1_55
atgttaaataagcttgccaaatatcttcttactgctagctcagtagctcccgtatttttcaccttagctttcctgtcctatatatcaaagcactacaaattcatgattgcttacctatctctaggtgtaactattcttttattgtgtgttttgatcgtcaagtatgcaataaaccataactctgtcactaataaaaaattaacaaatgcctctcctgccgataaggaaataacaaattactttttaacttatctgtttcccttgattagcgggccagaagctttcatggacgttaggattgcgtcattttttgctttgagtttgtttttttacatcagcttttcaggctcttacagcttcaacccattgttgtccttttggggatataaatattatgaagctgaagatgatacaggcgtaagctttgttgtattatcaaaaaaaccattgctaaaggcatcaaacaatcgtattaatttgattaagcttactgattacacatacatagcaatatag

SEQ ID NO: 95627 - DNA, 894 bp, Klebsiella sp. 1_1_55
atggaattatttgcaataacagataataccgttggcactcgcattgttaaaattgttactgacagaccaacgcaaaatgtaataactcagttgttcaatgaacaaaaaacattttttgaagatcgctatactgaaggagtagagttttcaggtggatatatcacaagcggtgatgagttctttgtaattcctgattttgatgatgttatagctgtattggatgcaattaataatcccacagcaattcccgaatgggaaccagaagatatctctgtattcaatattatcgctcttttttcaggttatcctgaagagaatgaaaaacctgcaatcgccttgattcaaagcttcgataaaagacaagtcattgataatagaagaacaatttttcacaaaccttttcaagcaggtaataccttctgtcagtctgctgagcatggcatcgtcattgataataaactaacagccattctaacaggtacagaattgaaatttaaaagtttccatatgctgcgtaggatattcgatgtggatgcatatttccgagaagccacaaatgaagagttaacaactttttcttcccatgaaaaattttcagttgctcagggatttgatttaacgactattgctgattcagtcattagaaagaaagtttccttgattaacaaatcaagaatacttgaggactactctgtcactgagttaaggatttcagcagctgaaattggtgtcgttttagatactgaaaatgctggcgaatttgagaaaataaaaatgccacaaataaggaaagacgttaaaagattattgcacttcctagatgaagactatttcacctcacatataacaagaacgctgtatcgagcaaactctaaacgtcgagaagatgtataa

SEQ ID NO: 95628 - DNA, 303 bp, Aggregatibacter actinomycetemcomitans D7S-1
atgctttccttcatgagaattgatttgagtgaatggcaaaccataactgcaataattctatttttatcggtgttatttataatggcgtatcgaactcaaacggtttttattaatccgattttggctatttcaggatatatgttaattgattgtacatttaaacggcaggagaaagaaattcaagctatggtaataacaagagagcctattagtgcaggagattcagtttgcttggatcggctttcacattatttgtatattcgttctcaatcggactatcaaaataaagaggaatcagtatga

SEQ ID NO: 95629 - DNA, 942 bp, Aggregatibacter actinomycetemcomitans D7S-1
atgaaagcacaaattaaaaagataatgaaagaaattaaagaagaggatttcaatagctggaaagcatcattttggctaatcaaaaggaagaaacatccaaaggataaaagcaattcatattcagcaatgcgcgttgatatagacgataaactgccaagaagattcagaggatatttaaagaaacaacggcaagataaaaaatatcatcttgaaagttatgattatagtaacgctgattgcgatgatgtgctgctgacaattgagtctgaaattaccgattttagcaagattgaaattgagattggtaaaggatttgataatgctagggcgacttcttattcggatctactaaactcatgggcatatgtggttctttttgaagaagataacaagaagctatatgcttggaaaaaaattagtgcagacacacagcccaaaaaagttgcatcgaaaaatactatatttttccataatcacaaattggttgatttggaagataaggaagtatttgtcatttatccaaattatgacttctttatttatcaaagtattacatttatttccagcaagcgtcagtttgaaagttcaatgaatttcagggaaggaatgaaggagaagtctgatcaagtattgtctgattttcaaaatctttctgtttttaaaaatattgaattgattaaagaacatgttggagaaaatcttcatcgcttacggaaaatggcttccatcttgaagtcgggatactataaacagaccgattatattgaaaaattgatttccgtaagtaaggaagaaaattgggaactgaaagttgaagaaggtaaaattgttgttgaagaagaaacaatagatttattgctaaaactgctcaataacgatcgtttacgttctccaattaataatgaaacatttgatgcttctgcgaaatcgcgggttgactga

SEQ ID NO: 95630 - DNA, 624 bp, Enterococcus faecalis S613; identical to SEQ ID NO: 95594

SEQ ID NO: 95631 - DNA, 915 bp, Enterococcus faecalis S613; identical to SEQ ID NO: 95595

SEQ ID NO: 95632 - DNA, 624 bp, Enterococcus faecalis R712; identical to SEQ ID NO: 95594

SEQ ID NO: 95633 - DNA, 915 bp, Enterococcus faecalis R712; identical to SEQ ID NO: 95595

SEQ ID NO: 95634 - DNA, 687 bp, Edwardsiella tarda ATCC 23685
atggtatataataaaaaattggataaagtaatgggtattttagaatgccatgctttaatattggagatatatatgagagtgaacaaactgcgtttaggagctagattttcactattcattgtatcctatcttccattattttttattatgtgttttattcaattatatacacataaagattatttacattgggggggggtgagtctagattcaataactgtgttcgttaaatattttggcgcggtgagtattttaatcttattttctctctttgggattataggccttgctatatttctaaaaaacataaagcgccgatgtaaaataagcggacggcgagtccaaattatagacatcgaaaataaaaataacgaatcaataagttatctctttacttatgtgattccattcgtatttcaagatttatccacattatccaatgtcatcccaattggtatattgctaatggtaacatttttaatttatataaactccagcatgatactaatcaacccaacaataagtatgagttatacactatatcaggttagctatcaggatgtagaatgtgggaaaaagcgtagtggcatgattctaacaaagtctaaatatctggaggaaggggatttcattgatattgaagacgttggcccaaaacttttttatgctgagttattagaggaatga

SEQ ID NO: 95635 - DNA, 1026 bp, Edwardsiella tarda ATCC 23685
atgaaaatgctaaatctcgaagatttattagagtatgctgagaatttaaaggacgatgatgacgtaaaaatctcattatattttgttactcggcatcttaaagttggcgtaagtaaagcagctaaagtaacagacaaatatgacttttatattattaaagctcctatagctcaagatgtcgctaattttttcaaacaaacactttcaaatcaaataatatctcatgcatcaaaggatgatgttgagatgaaaaagtatactgtcattgatgatgatatagataataaaatttacgcatatgcaatgaataatgccatttcattttcaaaagtcataagcgaagatataaaaagtgacaaaatcagaacaatcacatctcttactgaaatttctgataacctttgggcttactgtataaaagttcaaaaaaacttagagttaacatactcatttagaaaaataagcaaagggaagatcacaacaagcgatccccaaagtttaaggcagagaatatgtgctcagtttgataaatcagataaagaattgagagtttttgatggcaacgctattaattttgatgataaaattgattgtatttatataaatgggcaattttatgttttccataaaaagagctttgagtctattgtcggtttggatgatgaatttattgaatcatctcagaagacattaaatataatcaaggggtttaatttggtggagggcttagacattattgagcaagctattttatacaaaccttctttcagaaaaacccttgcacatattgcagaaaaagggaatcatgcatcattaagcaaaaaagaagttacctcaatgaatgatgtattaagaatgtttagcaatgaacagtttacaattaagaatgagaaaattgtcattgaaaatgaaaagcaagctcgaaacttccttcgattacttaatgattactacaagcaagggatgacgacgaaaaaatactatggtacagaaagtggtagcttagttagcccaattaataagtga

SEQ ID NO: 95636 - DNA, 615 bp, Escherichia coli MS 84-1
atgagagtaaataaactacatttaggtgctagagtttcgctatttatagtgtcataccttcccctattctttatcatgtgttttgtgcaattgtatacttatagaagctatttaaattggaaaggtataagtgttgaatcattaactattttctttaaatactttggcgcggtcagtgtcattggtgtattatcattatttggtattgtaggattaacaatttttttaaaaaatataaaacgtcgatgcgccactagtggtagaactgtaagagttatagatattgaaaataaaaacaatgaatcaataagctatctttttacatatataattccgtttgtatttcaggatctatccactttaactaatgttatacctatagcaatattgttaacggtaacggctttaatatatattaattcaagcatgatacttataaatcctacaataagtattaattatactttatatcaagttacatatttggatttagaaagcgacaaaaaacgcactggtatggttttgactaaatcaaagtatttggaggaagatgatcttcttgatgttgaggacgtgggcccaaaacttttttatgctgaatcccataaggaatga

SEQ ID NO: 95637 - DNA, 1029 bp, Escherichia coli MS 84-1
atgaaaatgttaaagcttgaagaattattagagtatgctgagcaacttaaggatgatgatgcggcgaaaatatcgttgtatttcattactagacatcttaaagcgggtatgagtagaaccgcaagagttgttgataaattcgattttaaaatcattaaagctccaatcgctccagatattgctaaattttttaagtatactttatcaaaccagattatttctcatgcttcgaaagatgatattgtgatgaaaaagtatactgttattgatgatgatattgataataagatttatgcctatgctatgaataacgcgatatcgttttcaaaagttattaataacgatataaagaatgataaaccagttgtacttacctctcttgctgaggttcagaatgatttgtgggcctattgtattaaagtccaaaagggggctgacgtcacttattctttccgaaaaatcagcagggggaaagtcacaacaaatgaaccacaaaatatgactcagcgcgtattcgctttgtttgataaaacagataaagagttaagatcatttgatggcagcgcagtcaattttgatgacaaaatcgattgtatttatataaaagatcaattttatgtatttcataagaaaagttttgaggctattgtaggcttggaggttgagtttacagaagctgcacaaaaaacattaaatacaattaaagaacttgatcttattgaaggtttagatgttattgaacaagctattcttcataagccatcactgagaaaaattctcactcatatcgctgagaaaggtaaccatacggctctggaaaagaatgatgttcaagctatgaatgatgtgctaaaaatgtttcagaacgaagagtttaagaccaatgagcatggtaaattagtcatagaagatgagaggcaaggaagaaactttctcaaactgttaaatgattattataaacaaggcatgactacaaaaaaatactatggtacggatagcggaaatgtgattaaccctattaaggcgtaa

SEQ ID NO: 95638 - DNA, 573 bp, Escherichia coli MS 115-1
atgaccacggacttcatgtatactggttttttatacagttatggagggtggtgtatgcttaatggatttgctcgctatgctttgactgctagttcggttgccccagtttgcctgacattggcattcttagcttatattaatgataattataagattcttgtttcctcaattcttttggctgtcgtaagtgtggttttttgtgtctttataatcaaacaagcacaaaaatataatccggtcacattgaaaaacttagaatcggcatctccggcagataaggaaataaccaactatttcttgacttacttatttccacttatatctgggccgaccacttttatggattggcgattagctctatttttttatttaagtcttttcttctacataaaacactcgtcttcgtatagtttcaatccaattttgtctattatatttggattcaagttctatgaagccgaagatgacaccggggtgagctttgttcttttgtcaacaaaacctcttaccaatgcgaagatcaaaggtttgagggtaaagaagcttactgaacatacctatatgattgtataa

SEQ ID NO: 95639 - DNA, 894 bp, Escherichia coli MS 115-1
atggaactttttgcgattacagacagcgagataccgactagaataattaagattgacatagatgctcccgcacaaacggtagtagaaaatctatttagaactcagagaagtgagtttataaatgaagatatcgaagagatagacttttgtgcatcttataatgttcaggatggtgaaatattttctatcaatccatttgatgacgaaataggcattattaatgcaatcgaacggcctgatgctgttccggtttgggaccctgatgatgtgtcagttcattattttaaagcgttatttacgggtgagccagcttcgaatggtaatcctactcaggtttggcttcaatgtttcgacagacgacaaataattaataatgaaaaatcctttttccaagtagtaactcagcctggaaatagattctcagtgtccactcgtcctggtttttcgctcagtgatcgattaactgctattcttgtgggtgataaattattgttcaagagtttctttatgctccggcgattttttaacatggaagagtattttaatgaagctactagagaggatttagataactttatcggtaatgatatatttcatgtggaaaatgctgaagattttatgacgtttgcagattctgcaattaaaaagaaagtatctttgataataagttctggaatactcaacgatcagcctattgaaaatctaattgagtgtgcccagaagattggatatcaattaggtataactaatgtgaatggtgacaataaaatcactatgccaaactctaaaagagaagtgaagcaactattatatttcctcgatcagggctacttcaattcaataatcacaaatgagttaatgttgacgaattcgaagcgaccaataagaatttga

SEQ ID NO: 95640 - DNA, 639 bp, Yersinia intermedia ATCC 29909
atgatgacaagcacaaactctaacagtgcatcattcgataatataaagtttaaatactatctttattttttatctttatgggttttatttttatctgtatcaataatgtcatttgattgggtcttttttgaaaggctaatgaaattcctatcattacaatacacgccagactatatagtcaataatgcttataagctaaaaattaggaattttgtttttattttctgtatttcaatggttttatttggtattacctctgtgttctatttattctcatctttatccagaggttggggaagcactagaaaggttataaatgtaaaaaaccaaactcacgagcatttggagtttttgactacatatgtcatgcctcttgtttttacagacgtaaacagcaaaagaacagtgataaatttattgctaatgatttgttttattggggtgatttatgtaagaactaacaggttttatgccaatccttcacttgccattctaggtttcaggttatataagtgctctattaagagtgattcttcttgtaaggaatacactataatatgcagagggaaactatcaaatggcagtcaagtgaaaattaagaaaattgatgacgatactttaatcgctaaacttatctaa

SEQ ID NO: 95641 - DNA, 1008 bp, Yersinia intermedia ATCC 29909
atgaaagcagagttggaggagtttcttcaaaatgacggtctttctggtgagatgttctttattataaaaaatgacaataactatatttatcgacgagttgttttacatgatgaaaatacagagccgcttataacagaaagctttaaattatctatcgccaatgaaattctcaagcgtattacagttgacgataatggtggtgagataatagataatattacagatatgaactatgaaaacaaaggtgtctattattttgatatttcagatgatgataggggtgaagtaattaaaacaatagaggaaatatcatctctaactttagctgacaatcctgtggatttcaaatttaatgatgctagtcttgatgatatcgtaggccttgtttatcatattagcgatggtgataaaaatatttatttataccagcatagatatccgaactttttacataaaaaatcaagattatcttttttagggaaagatgatgttttagtgcctataccttacgatatgataaatatatcaaaaatcattgatttcttcatttttgatggggttagttatgctatcaatattaaattattggaggaaagatatggtcttactcaagttatagataacatggtgaatgaggtaacacctaaaattattgagctggagatcgttaataaatctgttctgactgaaccagaacagctttttgatgatatgaaagaggatcgtggcttcatgagaaaattagccagagttcttaaaaatgggatattagaattaaatgtcgatattaatatagttaatgagataaaagatagttttccaacaataggcaagaatattgaggtggtaaatgataaaaatggaattcaatatataaaattgacaagtaaatcgagaaaaaaagcctttattaggttgctgaatgatgaagcggttcgttctgttctaacacgaaaaccatcaatagcgcaaaatcataaacctgaaaaagatgtagctccggcttga

SEQ ID NO: 95642 - DNA, 600 bp, Lactobacillus reuteri 100-23
atgattaagattatattgtttctgatttcttatatacctctatactttgttttattttgtaataacttgcttaattattatagtaagacaaataaaaaattaaatattcagaatagaattttaaattctattggagtttttgaacaaaaagatacttttgtcttttatctaattattggtttaatagtagtacctattgtgttgttttttatttttcttttttataaagtaaaaaccgggaaaagttctccagtatatccagaaaactataagaaaacaggtgatacaataattaactatttaattacttatattattcctttctttagcatggatattactactccctctgtatatttttggggtaatattattttaatatttgttgtaatggtactttttataaggctggatgctgtttatctaaatccccccttaatattattaggtttctatatttttacagatgaagatgaaaataagtactatttaacaagaaatagtttgacaaaactaaaaatggcaaaaaaagcgaaagattatttagaaattatacgtataacaagtaatttttactacattaaaaaatataagatttga

SEQ ID NO: 95643 - DNA, 987 bp, Lactobacillus reuteri 100-23
atggatacaattaatgctgtaaaagattcatttaagaaggctgaagaaataatcgaagatgatgcaacagatattaccttatttctactttggaagaagaatagtaaaagtgatatgcagtttagtaaagctgaaatagggaatgaagagaaagaatcatttataaaaagatttaaagaagattattcttcaagcgatgaatattctccttatagtgtaataatggaaaaaactgatagaaaaatttatataaataaggatttctttcctttgatgaatagctatatttcagcgttaaatttagatgttccagatagtgataaaaaatataatggtgatttggacggagttgtagatcatttagattatgtaaaaggatattgtgcagattttgttaacacagataccaaaaaacatgtctatttatttggaggagtagctggttttaattctatgcagaagaaaaaagctttggggatgattggtaatgtaactgtttcaggaataacaaagttaagtgataataataaaattttaggattcaggccacacacgatttgttatatatacgaagatacctgcgttattcaatctaaacaaggatttgaaaatttatttggacttattgaagaatataaaaaatcagctttagaagtagtaaaaaccatggaagaggattctgattttttccaaggcttttcacaaatgaaaaatgatttagaaaagaaaccaatttattacagaagtttagttaaattttcaaaataccccgaaagactacaaaaattatcagatcatctctctgacatcgaagatgtcgttaaagaaaatggtaatttttcgaacgattatgacaaagttgtattaaatgataaaggaatagtatatagtacagatgcattagaacagatattgtccttattaaatgaaaaacctgttagctcactaattacaggagaagaatttctagcagatagagacgaataa

SEQ ID NO: 95644 - DNA, 618 bp, Vibrio cholerae MZO-3
atgaacaccctacagaaaattaagctttacattctgtctctggcactactgtttgtgatcatagctatcattacagctaaactcccaaaagaatcatttgaatggtgtaaaccagaagaagcctgcaacacaaaagcaattttaagcaacttgtttaattatttttttctactactaaaagcaaacgttattccactagttatgcttttgttgctcgctattagctggtgcttcaagtacgaattcgaccacttacttcaaggcggcggacagaaaataatccgaattcaatctatagaaaacgaagactatgaacaccttacgttcttagccacctatattattcctttctttggctttaaatttaacgacccaaatcaattcactgcaattattgtattactcgtaatcataggtgccatctttgtaagaaccaataaatattacgctaaccctaccttagcggtacttggttataggctatataaagcaactttaaatgacaaaaatggtgtttatgaatcgattgttgttatcagtaaagatcaattaaaagaaaacgaaattgtacactgggaaaaaatatcggataacgtattttatattaaaagaaaataa

SEQ ID NO: 95645 - DNA, 705 bp, Vibrio cholerae MZO-3
atgagcaagtttaaaacgtggctagaggatttcatcaacgggtgtgatggaatagcagtatattttgtagatgatgcaaacaagatacatgactctgatattgactcaaaagttctcgctaagtttcgaacggctttctgtcaggacttaagaaaaaagtacactgatagtgatgactttgaagtagagaaactttctacctttgaggagcgaccgcatactctttatgcttatgatttttctccaagagagatgcctttagagttcaaacttactaaaaatgtgttggacatcaaaccgactgatactattccgaaatatcaggtcaaagcgaataagctcagtggtattcgtggggcaatagtactactaacaaaaggaattagtgaatccattgctttttatcaacacatattccctgtttcattattaggcccagataaaggcgtattaaacctcactacacatgccactaggcttattgagttagaaagtgacgtactgaaactcaatacaaaatttgttttcatgcaatgtacacatggatatttcgttgagaacgttggcgtattagaaaccaacctccacttcaaaaaagcaataaatactcgtgctaaaaagtatgctggcgaaatactctctatggggttggtagaagaggctttgttgcgtaattcgttttcgaagccgagtagccctacttag

SEQ ID NO: 95646 - DNA, 582 bp, Shewanella putrefaciens 200
atgcagtttagattgattcctgcattactggttttcttgggttcttacttcccacttgcgctaattctattggtacaagatgtaagcgaatctagttggtcttcaaacttctgtactgaatgggaatcgtgtcggttgccaacgtttgatcatccttggctggcattttctgctgtagctgttacaggactttgcctcctgttaacgtgtatgatctttaggattattcgataccgatatcaagttaatgtagttgaatccaaatcgattccgagtgaactcatcagttatagcttcccctatatagtgtctttcatgggggtggactatggtgcattaggtaaagtagtcggtctgatgttctttctgttatggttatttctaataacattcagatcaggtcagattattttaaatccaatattacttatattgggttggaacctttacgaagccaaggtttgtgttaacggacatatccgtatcacgcgtgtgctgagtaagtctaaactcactcccggtgattatcgctgtgaggtgattcaggataactacataacaaaagggaatgatttagaatga

SEQ ID NO: 95647 - DNA, 912 bp, Shewanella putrefaciens 200
atgacggattttaccgattggcgagagtttgattatcaacaagcagcagtacagttatgggtttttaaaaaaagtaccacagataaaaggtttaaggcttggcatgtcagaactgacgtcagaatagaaacattatttcgtgatgccattgtcgatatagtgtcaaagactactgaaaaactagattacagtccgatctctcaaaataacgagagtagttgtttagtgcatgctttggagagcagtgagggccttttagcacttctggctgctgtggatttaccagaagcggataacatcgatgcggagttaaagcacctgaagggtgctgctgggtatcttgtgaaatttcagcatgatgataatactgtctatgcggttagaaaaacggctccaacttggaaacctaaggtgagaaatacagttatcaatgcaatattccataacggcgagctatctgttactcctgaggaaaccttttcttttgattcattttttgattttttctgcataaatgaaactgttttcgttaagtcaaaacgtgcttatgaaagtaccatgtctgaaaaaagtgcatataagaaaaacttcgatgatttagtcgtagaaccgacatttaactccatattctctgatatagaaccactaaaagcttatgttggaactaattctatgcagttgaggcgaataacggttattcagagtaaagcattatatttacgtcccaatttcccgcagaaattgcaagagattaatggtaagagaaacttcggactgaactttgatgacaacggaaaactaattgtgtgcaaagacaccgccaagacggttttgcaagtcttattagatcatcgccttctgagcgaaataactgacaccatttacgatgtgccagatgctgaagttgtttag

SEQ ID NO: 95648 - DNA, 522 bp, Lentisphaera araneosa HTCC2155
atgaatacttttgctaagttgctgctaatagcaacatcattgtcccctttgctcggggccgtggccatcaataaatgggcgactaaacaagcttattggcaatggctagttatagcgttattgcttattttgatctgttgggggctattaacttatttaagaactaagggaccaggaatcaatacttttacaatcaaagaatttgaaagtaaagacaaagaaatgctggcatttttattaacctatctactaccgtttatttcttccgataagctttcttttacaggcgagtggtttaccggcgcgtatatcattggcgttattttctttacccttgcccatgcaaatgcttttcacttcaatcctgtaatgggctttctgggttttcatttttacagtgtcaaaagcgatgatggactaagttatttacttattacaaaaaatgaagtaagaacgccaaattctaatatagatacagttgagattgcgcataatatccgaatagaagttgagggaaaataa

SEQ ID NO: 95649 - DNA, 891 bp, Lentisphaera araneosa HTCC2155
atgttacgtaacttacagttaaccacttatataaaaagaaataatgaagagtcactattacgtatcccaattcacagggatttacaagaaagcttagaagtcttgtggactgaacaataccttgcttttacctcggagacacaggaggttgttttttctgctggttacacccctaatgatgatgaacgttttgtgattaatgactttgagctcctcgaacacttaaatattagccgcgagcacactcgtaatttaacctcaatagcctcctgcgctgaccagctcaattctgtaaaagcgataatagcttttgctcaagatgaagaaggtaatgagttgatgctttttcaaaaattcatgaagtctcatattattcaaccaggaagatctttgttcctggcaagtgacacttatacaagctccaataaaccaggcttaactttagggaataaattagatgcggttgtctttaaagatgagctaaagcttctttttcaaaacttccgaacaactaacgttttcttgcctttaggtgacttctatagagaagtgactgagactcaaattattgaaattttacaacatgataatatttctatcgatagacctgaagctttagcacataaagctagtcagtggttcaaaacccgtttttccatgcttaaagactctggcgttttggatagctacacacctagccaaataagaggtgatgcaagtggttatgaggtagaaatcgaaattgatacatctgcgggacatgagcaaataatattcccaaccgataaaaccaaagctaagaagcttttacagtttttgaatgaagagatttataagggtgccattacccaaaaactttacgaaacaaactcaaagcgtgatgctgagtga

SEQ ID NO: 95650 - DNA, 198 bp, Salmonella enterica subsp. enterica serovar Hadar str. RI_05P066
atgatttatgtaaaaacaaatcgtttttattctaatccatcgttagcattgcttggatttagaattttcaaagctaatataaatgatagaggaaccaaagaatttgtaatcatttgccatggcgaaattgataacaacagcagaataaaatatatcaaactagataacaatacatgtcttgctaaaatcactcaataa

SEQ ID NO: 95651 - DNA, 978 bp, Salmonella enterica subsp. enterica serovar Hadar str. RI_05P066
atgttcacagcaatagataatatattaaattcaacccaactctccggtgaggcttattttgttgcagaacaccaagggcaactagatattttcagagtagctctagaaccaggtgcagaacagaaattaacacagtctttcagtcgatcacttaagcgtgatgttgttgacccaaacactggacagaacaccttgccgttagtttcttctctgctaagtcgagataagcaggtgcatgaatatgatcaccaagtaataaactatcttccacctgctctagcaaagatggcggacgtgcttagctttggagttaataatacacccactgactttgactttgcccagcaaaacctatcaaccgtgaaaggaatagtttattatctttgtgatggtcaaggtaacggagttgttgtttaccaacacaaatatccaatcgcactacataaaaaaacaaaattgtcatatttctctgcgaatggtagaacccttgatgaggtcacccatgatagcattgacataaatgggaatgtggatttcttttactttgacaacaagtattatgcactaaatatcaacttacttgaaagagcatatggccttgaacaagtcataaataatttagcggcaaatgcaacccctcatataatcgcactgaacatcttggacgtatcaaatcatccgaaccctgcagacatttttaatgacatgcatcgaaatagaaacttcatgcgcagacttgccaccacagcaaacagtccactactacagaatggaactattaacatagccaacattcagacattaattcaaaatttcccgattcttggaaggaatataataatcaatcaagctggattgatagaattatcatctaaaaagcaaaaactatatttcattcgcctgctaaataatgaggcatctttcacagcattaaacctagagccttttcttgcggtcggaaaagactcagcggcataa

SEQ ID NO: 95652 - DNA, 369 bp, Alteromonas macleodii ATCC 27126
atggatgcttcgatacgcgaaaaaaacctagaaaggtttaatttctctgtagcaactgtagaggcagctgaccgcgaaaacatgggttttctacttctgtatttgcttcccctttttacttccagtttcacgtcgctaaattggacaatatgggtgcctactttattaatatttgctgtgataacgagcactggatatagctatcacttcaaccccctgctaggtattatgaagtggcatttttataaagtagggacgccagaaggtgtcacgtatgttctcatcacaaaaaaagaacttagacatgccagccagccacttattgtatctcagttaacagaatatattgtcatagatgtagaggactaa

SEQ ID NO: 95653 - DNA, 888 bp, Alteromonas macleodii ATCC 27126
atgacagcacaacaaaactttttcgcacttattaaggatgatggcggaagctgtcagattaaaagactcagggtcaaccaatcacttcaaaacgagctgatagaaatttttaatactcaacgaatccgctttgaacagggcattgatacggaaattgcatttaacggtgactggaagccagattcaaacgaaataatgaccctagataatcttgatgaatcagagctaatggtgaatgctataaacgctaatgcttcttcctttccagacctagacatttctaatttctctgatgagccaataaaagcattattttctggctttacagaaaactctcagacaacagttcttgttcaaaaatttacttcacgacaagctttgtcattagcagaattgcctattatcaaaatgcagacaggaaatactttcgtaaaaactacagataccttgttcacaattgacaataagctggtagcaataatagaggctgacaagaccaaatttaagagtttccataacgctagaatggtctttgaattaacagattattataaagaagcgacagacgaagacctaaatgatctatcgttgcacacttcgcttgaaataactaatttagaaaacttcaagggcattgccgatagccaaataagaaagatggcccactctataataagttctcaggttcttgacacctatagtgtaagcgacataacgactgctgcctcctcttttcctgatatcagagtaagtgttaacaacggaaaaattgtcttgcctgaagataaaaaagaattgaaagaagtgatgcactttttgctagaagacatttatcgaggccctttatcaggaaatgaatttttaacaaactcgaaaagagagctttga

SEQ ID NO: 95654 - DNA, 606 bp, Enterococcus faecium E1071
gtgagaacgatacagaaattccttttttatatgtcttcattcatgcctctttatttgctgttatgtgtgcaaaatattaaggtatttgataaaaataagaagttttcatctgatatattttgtagtcaatttaacttctccaatattccacaatctattttttggtggggcttaatagtttttgtttttatttctctttttggatgtatattgtttttttttatttatacaaaaaaagatggtattatttccaaattagaagatgctgaatttgttagggaagatacgatgggatatattgtaacttatattgttccactgattacgatggatatttacagtcccagaagcttgatcgttaattttgttttatttatagttataggaactttttatgttaagaacgatcaaatatttatgaacccagtatacaatctttttagttacaatgttttttcaaccgaaaaaggcatttatattactaaaatatctaaacaaaaattacggtctatatctaaacatggattagaggtaagaaaagtaaatattttagcagatatttatgtgttaaaagaggcagataataaaccaataagtcagttttaa

SEQ ID NO: 95655 - DNA, 909 bp, Enterococcus faecium E1071
atgaatattgatgagattagaagattcatgcgtgatctagatactgccaatactgatagtataacaatgaaagtggtacaaaaagttggtaatggtattgatatctataccccggaaattattgtaggtatgcgagaaaacttaaaaaatttcttttgtgagagtttagacaataaatttttcgatttagagcaaagggtttatgatccgagtgttgtagttgaaggtactttacaaatctctgatttagcaacggctcatataaatgatgtgttagcagacctgagaaatagcgataactatgttggagatgtcaaagatatagatattgagcgtgtaaactattatgtttttgaattttctaataacgggaggaatttgttaatctttagaagatttactaaaatgaaaaaaattagaaatggtttattgggacattttgtagataacacctttagaaaaattgaaacagatgatttttttggaatcgatagagatatagatataatgatttttgataatcaagctttgatagttaataggttcgcattgcaaacaatttttaaactaaacgattattttaaccagcaagcgcaaatagcattaaaaaaaatttctgatgtgcatgtcataagcaactttgatgaattttgtgaggattgtcttaatgataaacttgctgcaagaagaatgactaagattttgaatacacctggtagattaagtggtttttttaatcatttagaacatttaccaaaagttattgagcacttcgatttggatataatttttgagaataaccaaattacttataatttaaatagggattctaggaaccatatattaggatgtatctccgatggatattatcaatcattaattcaacaaagatatggggaggaactctag

SEQ ID NO: 95656 - DNA, 588 bp, Escherichia coli H736
atgaaacgaaaaagcacattcaacaagatgggactatacatactgtctttaatgttgctgtttgtttttattatcattttgagcgcaaaaatcccattttgttatggctcttcctgccattttataggtttttatcaattagcttccagcaacataatctcaataatttgtttaatttttataggaatagcattttatttctatagaaggtttaaaggattgacgaaggtcaacaatgctgactgtgtaacaatcactgcttgccaaagtgagagctatgaaagtttgactttcttagcaacttacatagtaccttttatgggattcagttttgatgaccctcagaaaaacattgcgtactttctcttaatagtagttattggtttaattttcattaaaacggataagtattatgcgaatcctactttggcgcttttcggttataagttgtatagagttaacatttctcatgcaggaagtggtgaagtaaaaaacgtcattgcaatctcgatggatgtgctgactgttgacgatcaagtattctatagtttttttgatgactacgttttcatagcaaggaaaaaataa

SEQ ID NO: 95657 - DNA, 960 bp, Escherichia coli H736
atgacccctgtgaattttaaaaatcaaatcaccgaaattttcgataatttctcaggtataagaattatctttatagttaaaactgaagataattatgaattaaaattatctaaaatagatgctgaagctttaccaaaaattgttgaaggattcaaaattaggctttacgacgacattgtgacaaatgaggatttaaccattcctctcctttcgaattttgatgatagaaaaaatgccttgtttgcatttgattatgaagaacatccaaaagagtttgattttataaaaaatgcaatagccataccgcctaactctcaggattattatgatttaaataataaatttactgacgtgaaagggataataattcagttaagaggcaacaataagtgtttgtcattgtataagaacaaaacaaacctcatggtttttgagcaaagccgaaaattgtttaacttgataccagacgcagacgggtatttaaaagaattgccaacccaagtgttccgattagattataattatgacttggctcttatagacgacgaattcctgataaaaaatcaaaaaactttagaaataacgatgcagttccatcaggttattgaagctcaagcaacggtggctttggaagcattgaaagcttcattgcttatcgaagatcttactcaccttgagaagagtgcaaaagaaatttctttctcaaggaagcttgccaaaattgccaaacactcacctgtactggggaaaattgatgtgccagagattatcgattatgtaagcaagcatacctatctttcaacagttttaattgtaagtgaagacggcacacaattgctcgtaaaaacaaaagaatcccaaaagcattttattaaactacttagtgatgattatttagagtctccgctcacaaaaatactctatgactcattagctaaagatgaactaaaagcacactga

SEQ ID NO: 95658 - DNA, 519 bp, Escherichia coli TA143
atgaacaaattagcacgcttattattaacagccagctcaattgcacctgtttgcgcaactctattttttattggatatgtaaaagatacggtttggctgatgcaatatagcttatgcgttggcatagcaagttggttattagcaataggcctgattcaatatgctgagaaacaacttgaacctctgacaaaaaatattagttcagtttctcccgctaacaaagaagtaactaattatttcttaagctatttattccctctcctaggaacagattctattgctgaaaataaagcatatgcgttattcttttatttatcattgttattttacatcagcttttccgagaactataactttaacccagtattgtcacttatcggttataaattttacgaagctgaagatgacaccggcgtaggttttgtattgatttctaaatcagttattactgatattaaagatatcaaatttacagttattcaattaacagactacacatttctacatgttaaaggataa

SEQ ID NO: 95659 - DNA, 885 bp, Escherichia coli TA143
atggcactttttgcagtaatagataatacaattgcaacgagaattgttagagtcgaacttgatgcaacagcaagtacttctgttacggccattttccaacaacagcgtcaatattttgaaagtcatcataacaatatgataccattctatgccggttatacaccaaaacatagtgagtgttttgaaatacaaaactttactgattctgcacgcctgattgacgcagtcaataggcctaccgccgtgcctatctgggatcctagccaaattgatattggttatattaaagcattatttgttggtgttgacgcgccagcaaaccccaatattattgcactacaaactttcaacaaaaaacaaatcttagatacctcaaaatcattctttggaaagctttttgcaagcaaaactacctttagtaaagctaatagcatcggttttaatgttgatgataaactagttgcaataattatcaatgatacaatacgatttaagagtttctttaatctaagaagcatttttgacatgtcgtcctatttttctgctgctactgaccaagaacttaatgcatttagtcaacttagtgtattttctactccccaaggttttgatctaaaatccgttgcagatacagtgataagaaataaagtaacactaataaatcagactgggatgctaacaccccaaaatatgtcaaagtttaaatccgaagctgctaaagttaatttccccttacaaaccataatagttggcggtgttgagaaaattgtcatgccttcatcaaaaaaagaaataaaagcccttcttgactttcttgaggaagacatttgggtttctggaataagtggaagacgctttaaatcgaattcaaagcgcccaatataa

SEQ ID NO: 95660 - DNA, 615 bp, Escherichia coli MS 85-1; identical to SEQ ID NO: 95636

SEQ ID NO: 95661 - DNA, 1029 bp, Escherichia coli MS 85-1; identical to SEQ ID NO: 95637

SEQ ID NO: 95662 - DNA, 615 bp, Escherichia coli MS 124-1; identical to SEQ ID NO: 95636

SEQ ID NO: 95663 - DNA, 1029 bp, Escherichia coli MS 124-1; identical to SEQ ID NO: 95637

SEQ ID NO: 95664 - DNA, 491 bp, Prevotella salivae DSM 15606
gtaatgtatggaggaattttttctcagacaaaacgtatcttaatagctttgaatggttggctattaatggtagcctactatttatgttgttctgcataataggagtatcactctatcttaaacataaaggtaagcgtccaaaagagggaaagactataacagttacttcttatacaaatatgtcgcaaaatggagtggaacaagttctgtcatcagtaattccatggctcacggtttttgctgataatttagattttaaaattttattttttagcattgtactacaaggctgtcttatagcaataactagttacaataacagtaactataatataatttgttcaatattaggctatcgctattatgaggtgcatactaaagagaatacatatatactactttcaaaaaaatgtattagaaatagaaaagagataaagtcatatacagatataacagattatatgggattaatcattaaagacaaagaataa

SEQ ID NO: 95665 - DNA, 786 bp, Prevotella salivae DSM 15606
atgagccaattttacgctttaatgtcagacaacacagtgaagtatatttcactcaatgaggatgtggttaatgatattagaaatatttttatcagtggtgcagcgaggttgaaaactgcggaaatggaagaagatgaatttaatggagatataatggcaagaaaaggagaaaacattacttatgtaaatttcttcttgccagacgacttcagtagaatacctgacaatcaagcagatatgtctgaatataatatagaggaagatattcctaaaagtattttctggtatgaagaagggagatacctttttcaagtatttaacaaaagaaacatattaaagcgtaaaactgtcttgaaagttgaatacgggaattcttttgcaaaaatgcaagaaaaggcgtttgtaattgaagaaaaggttaatgccatatatgaagatggaaagttttattttcagagttacacaagtgccaatcagatttttcctttactagattttgtgactgaagcaactaatggagaaattgattcttttggagaaaatgaaaacttagaagctaatgctgtccgtattaaagatattgcaaatgttaagaccagaagactaatcaaagtattatcatctacaacaaatgtctcaacatttataggtaaatcccttcggacaaaaaaaagtctcttaaagaaatatggtataaaagcccagattaataatgagggaaaacttatccttcctactcataatgtatcagaacttaatagaacattagaatttctcaatgaagac

SEQ ID NO: 95666 - DNA, 585 bp, Xanthomonas perforans 91-118
atgcagtttcagttctggtcagcactcttcatttttttgggctcctatttccccttggccttgatcctgatggttcaagacatttcggcgaagtattggggtgcacccttgtgtggctggagagggcaatggaactgccagtttcaggtatttggtcacccgtggttggcgtctgggagcgtaggggttaccttgggagcgctcctgttgatggtggtggtgctccgctcggttcggctgacgcaccgcgtgcacgtgcaggaagtgaaggctattcccaatgacctaattaactacgtgctgccgtatgtggtgtcttttatgggtctgagctatggggatccgcaaaagctcggcggttttctggtcttttggattgggctgttcgtcattacgtatcgatccggtcagattttgatgaacccactgctgatcgtgatgggctggaaactctacgaggctaaggttgccttaggccaagtcggtgccgttcgaatagttagggtcttgaaaaaaggtgcgcttttgcccagtatccagatagccgaagaaatacaggacgtttatctaatgggggatccatga

SEQ ID NO: 95667 - DNA, 930 bp, Xanthomonas perforans 91-118
atgaccgaccaagcattgagggaactgcagggttttgatcttgataccgcaagggttcatttgtgggtctttaagtccagcacgactgtaagccgatttactgccaactatgtccgtatagatgaggctctggagggtaggctgcgcgagttcgctaagacgcaaagggcaaagatgactgagtggattccctatggacacttggctcagcccacggacaacggctgcttgtcggtctcagctgcggacaccgactttgccttgcttcaggcgcttgtagaccgcccagagctcgaacacccggcaaagaagcgtgaccagctcaagaatgccgctggttatgtagtcaagttctatcaggaagagcgcgtgctatatgcagtgcgacgttctccggccacgtggaagaccgcgtatagaaagaaaggggttatcaacatggcgttccaaaacggcgcgctcagtgccgtgcaggaagtggattttaccttggagccgggatttgatctgtttgccttggatgactcgttgctcgtaggtaataagcgtgcctttgagtcaatgatgaaatatcgtgctggctttgttgacgcgtttgttgagcttcaggaggaaaaaaagttcatttcccttttcaccgacatggcgcctttggtcgctcatgtcgggcttaatggcactcacttgcgccgcatggcggtcattcaagagcgtaggctatacgaaaaccccaaatatctggggacgctgcgcgaggtgtgtgaaagacacaactggggaattcagtttgatgccgaaggattgatcatcccaaccgaggaaaccgcaagggtgataatgacgctgcttctagatcagcgcctgatcagcgagatcaccgcaatcatgtatgacgtgccaggcggtcatcgtgtggatgcggctcagtaa

SEQ ID NO: 95668 - DNA, 636 bp, Yersinia enterocolitica subsp. palearctica 105.5R(r)
atgacaagcacaaactctaacagtgcatcattcgataatataaagtttaaatactatctttattttttatctttatgggttttatttttatctgtatcaataatgtcatttgattgggtcttctttgaaaggctaatgaaatttatatcattacaatacacgccagactatatagtcaataatgcttataagctaaaaattaggaattttgtttttattttctgtatttcaatggttttatttggtattacctctgtgttctatttattctcatctttatccagaggctggggaagtactagaaaggttataaatgtaaaaaaccaaactcacgagcatttggagtttttgaccacatatgtcatgcctcttgtttttacagacgtaaacagcaaaagaacagtgataaatttattgctaatgatttgttttattggggtgatttatgtaagaactaacaggttttatgccaatccttcacttgccattctaggtttcaggttatataaatgctctattaagagtgatccttcttgtaaggaatacactataatatgcagagggaagctatcaaatggcagtcaagtgaaaattaagaaaattgatgacgatactttaatcgctaaacttatctaa

SEQ ID NO: 95669 - DNA, 1008 bp, Yersinia enterocolitica subsp. palearctica 105.5R(r)
atgaaagcagagttggaggaatttgttcaaagtgacggtctttctggtgagatgttctttatcataaaaaatgacaataactatatttatcgacgagttgttttacatgatgaaaatacagagccgcttataacagaaaactttaaattatctatcgccaatgaaattctcaagcgtattacagttgacgataatggtggtgagataatagataatattacagatatgaactatgaaagcaaaggtgtctattattttgatatttcacacgatgataagggtgaaataattaaaacaatagaggaaatatcatctctaactttagctgacaatcctgtggatttcaaatttaatgacgctagtcttgatgatattgtaggccttgtttatcatattagcgatggtgataaaaatatttatttataccagcataaatatccgaactttttacataaaagatcaagattatcttttttagggaaggatgatgttttagtgcctataccttacgatatgataaatatatcaaaagtcattgatttcttcatttttgatggggttagttatgctatcaatattaaattattggaggaaagatatggtcttactcaagttatagataacatggtgaatgaggtaacacctaaaattattgagctggagatcgttaataaatctgttctggctgaaccagaacagctttttgatgatatgaaagaggatcgtggcttcatgagaaaattagccagagttcttaaaaatgggatattagaattaaatgtcgatattaatatagttaatgagataaaagatagttttccaacaataggcaagaacattgaggtggtaaatgatgaaaatggaattcaatatataaaattgacaagtaaatcgagaaaaaaagcttttattaggttgctgaatgatgaagcggttcgttctgttctaacacgaaaaccatcaatagcgcaaaatcataaacctgaaaaagatgtagctccggcttga

SEQ ID NO: 95670 - DNA, 576 bp, Streptococcus sanguinis SK160
atgcagcgagatcttttttctaagtggacattgtttatcacctcgtacctaccactatatttatggcttctttttagtaatattaattattccaaattttcatttgagagattaatagctcttgatttcaatcataaattgattcgtgcagtttttgttgttctaatttttatttcatttattaaattatggaaattatttaagtttgatggtaaggaaagtatcaaaataccgagaaaaatggaaatatcaccggaaagtgattcattgatgaactacattgttacgtattttactccgttactgtcttttgatatgaataatacaactagtattatcatgaattcattattatttcttttaattggattgatgtatgttggcagtaatgcaagttatcttaatcctgttctaggagtatttggatttaagatatttggagttacaggttttcctcacgctcatcatatcataacaaatctctcatttgatgatatagaaacagcgagagaaacagatgtagaattaactagttatagattaggtgatggaatttacattttaaaaagaaaatag

SEQ ID NO: 95671 - DNA, 978 bp, Streptococcus sanguinis SK160
ttgattccaataaatgttaatgatgaaaaaaacgggttggcttcttttagtcaacaaccagattttgatgaatatgttaagatttttctaattaaaattaagaaaaatgagatttttttatataaacaagatgctgataaaaaaactaaagaaactgtgataaaatcaattattgaaagtatggggcaatctatttttagtaatcgagaaataaaaccatatgatccggtcgtaacgtataagaatgtacatgagcaagtagaggtgtcgaactacggaaatattcaatctgtaatttcaaaatttaatgatgaacaacaacatctacttagttcgagtagtgaaactgaaaaaacattacacaattatttggttgtcataaaaaaggatgatttaattaatcttaaattcattggttcgtttgtaaatgcatttcagttagaaaaaaagtggattattggtaattttacggataataaaattaatctacgtaatcaaaataacctatttggtttgaataagaagattgatttgatgattgtcaatgatgataaaattttaatcaatcaagctgaatcaaaatttgattctatatttggaatgaatcaaaaatttgctgagcaagcaacagaaattctaaatactaatgcaaatataaaaactatatttgaacaagcttcaattaattttttgaaaacaaaagtgatcaatggtaaaagacttgctacgaggttaattaaaattgtttctgatacgaatcgttttacagaaacagttaaacatattgacaaaatacaaactataaaaaatgattctaatcataaattttataaagcaattgaaggggttacgttcagtaatggaaagctaagtattactgatgagaaaaattgtgttcaattgattaatgctatatcagatgctcttgtaacagcttatatttctgaagttgaaacggttgaagaaggacgtatgtaa

SEQ ID NO: 95672 - DNA, 519 bp, Photorhabdus luminescens subsp. laumondii TTO1
atgtttttaagcaaacttgctcgctttgcattaactgcaacttctgtggctcctgtatgcatcacattggcttatttggctttcattcaaaaaaactacattatgcttggtgtgtatataactataggagtgattagtgtctttctctgtattattatattgaaatattctattcatcattcaggtcgaacaaaaaagaatataaaaacagctactccagctaataaagaagtaactaattactttttaacatatttatttccattgcttagtgcgtccgggacattttttgactggaaaattgctgcattcttttacattagtttgcttgcttatgtttctttctctgaaggttatagctttaatccgttattatcattcttcggttataaattttatgaagcagagggcgagacaggtattagttttgtattgattaccaaaagggatttatttttagtgaataacgacaggttagatgttataaagctaacagctcacacatacattgttgtttaa

SEQ ID NO: 95673 - DNA, 900 bp, Photorhabdus luminescens subsp. laumondii TTO1
atggaattatttgctataaccgacactagtaaaattgtgagaattgtcacagactcagagacgcaaaaatctgtaaacgccttgtttaaaaaacaaaaagaatattttgaaaataattatacgacatctgtagaatttagtggtggttatattaccagtcctgtggagtatttttgtattgataattttgatgatgttataggtgttcttgatgcaattcagacgcctacctccattcaagagtggagtccgcaggagatatctatttttaatataaaggctctgttttctggtgaaattacttcatctgaaacagaagataatataaaagcttatcttcaatgttttgataaaagacaaataatagataataaaaaaacattgtttcatagtatacttcaagacaaaaatacctttaagctatctgattctgatggtttgattatcgataataagctaaccgcaatacttgagggtaataaattaaaatttaaaagttttcatatgttgaggcgaatattcgatgttgatgggtattttaaagaggccactgatgatgatttaagagagttttctaatcatgatcatttccatatttcaaataattttgaccttacaagtcttgctgatacggtaataagaaagaaagtatcattaataaataaatcaagagtcttagagaattatactgtggatgctttattagcagcagctaatgaaaatggagtggtttttgatttagatatacacgaagataatggcaaaaggaaaattgcaatgccacaagagaaaaaacacattaagaggctattgtgttttctggatgaagattattttacctcgcagattactcaaacattatacaggacaaactctaagaaaaaggttaatcaatcttaa

SEQ ID NO: 95674 - DNA, 591 bp, Leuconostoc gelidum subsp. gasicomitatum LMG 18811
atgataaaaatacaattattcttgatatcatatattcctttatatgggttagtatatttgcaattagtagctgataaatattttcaatatcaaaaaaattttaagtcaaataaaatcttaaataacgttcttctgattataaatgaaaatgctgtttttggatattatatcctagctcttattttatttcctttgctatttttcattatataccttggttatagaattaaaaaagataagggatctgatcaacttataaatcgaataaaaaaatcagatgacaacattattagttatttgatgacttatgtgattccttttttgacggccggaataaacgttagcgctccaatagtaacaaattttgtattgtttcttataataatgatcatttacattcgaatggatttagtatatcttaatcctaccctgatattggtagggtacaatatttatatagatagtaatgatgatatgaaataccttacacgaaattcatcgcaagcaatacaaacctcaaggcaaaatcatgaaaaattaaaagttaccagaattactgatagtttttcgtacatcgcaaaaagaaaataa

SEQ ID NO: 95675 - DNA, 978 bp, Leuconostoc gelidum subsp. gasicomitatum LMG 18811
atggaagaaaaagagattacgagtgatacagttttaacggacgtaaaaactgtggcaacaatgttgaaaaaagcaggtgcagacgttagattataccttttatggaaaaataaaaaagaaacaatgtttagttatgctgaaacaagtaaagagattaaggactcgtttaaaaaaaggtggatgaacgattataatgatgataaaaatcaagaaattactcagtttaatgtaggcatggaaaaaacggatcatttgatgttttgcagttctgaagaatttcctttgatgaaaaaacatgttgaaaaaaccaatacagaaaatgatcctaaacaatttgttgaagatttgtctactattagaccaaaattaaatcttgtaagaggttactgtgcacatatttatactgatgaagaaaacttgtatctttttggtagcactaatactttcaatagcctaactaaatcgcgagggtttggattgattggaaatgttggagacaaagaaatcactaaattatcggatgatgatttgataattggattcaatccaaaaactacttgctatatacacaatagtgtttgtgtaataaaaaataaaaaaggatttgaagacttatttggattattagaagaatataaaaagttggcagaagaaacaataaaattattttcgaactatccggaattttatcaaggaatcgaaaatttcgaagacgacctgaatagaagacctatcttatataggtcagtagttaattttggaaaaaaaactggtatcatagaaagcgtttcacagcacttggatgaaattaagatgattaaagaaaacgatgcctttaaagcgaagtataaagatttaaaaataaatgacaagggaatagtttatactagaagttcacttccattatttttatctttacttaatgaagagccggttaaatccataattacaggaaatgaattttttgcagaacactaa

SEQ ID NO: 95676 - DNA, 600 bp, Faecalibacterium prausnitzii L2-6
atgaatttaagcttaaaacataagctaatgctgcaatcattgagtccattggcttttttgactattgtacgcaatttcaaattcacccccgtcagtgaacttgctgaaaatcagtcatattggggagaatttgtctgccttaacaatgtgctgattgttgtgtttttgttatgtgctacatggattttagcagcagtcatatcttttgtttcttttacggcatttagatggactgataagaaacaagggtatcaactttcttccttcgtagaaaaagaggacgcaagtttgaatttctttatgacaatgattatcccgcttttgattgatgatgtaggaacgattcagggagcggtaacattccttattattgtggttatgatgtgcgcgctgctaagcaaaacacatttgtactatgcgaatcctgtgttggcaattttaggataccgagtctatgaggttacctttaaaagtaaccctgactttaataatgaagtttgcttggctgtagtaaaaggtggatttctaaaaaatccgagcacagtagaatataaagtgattaatgatacagtcctctacatgaaggagatgaacaaatga

SEQ ID NO: 95677 - DNA, 948 bp, Faecalibacterium prausnitzii L2-6
atgaccaaggaagaaattcaggcatcgattaagtcgataatgttttctggttcagtctgcgggattgaaatatatgcctgcctgcgcgatgaaagtggatatcaaactaaaaaaatcagggcaacagataagttgctttctagtacgaaagataaggtggcgggttttatcaattgtacctatcttgcagatgatgcagaatttgacacatcagaaaatattgcagacaataagaaagaattttatgagattagtctgacagagagttatagcccctttgctttccttgatgatgctgaaaagcgtacagagtactactcggaaagtgatagaaataaactgtctggatttctttttaaaatcaatttgaatgaccagtacttttgggtttatcaacatatatactctatatcaagaattgatcgaagtaaaaatgtgatagccctatttattggagatacatacgatgaagtcgatagcgatattgtgcagatagattcacgagcagatataataatcttttcttcaagtgctgttacggcgaaaatggatcttatgcagagattctttggatttgagcaatacattcgagcgggggcacagaagacgattgagattattcgcaatctggatattgtagatagccttgaaaagtttgttgcgtttgaaaataaaagtaagttgacaaatgcaaagaagttattaaaggcaaagaattcgcctgttttgcagatgaaaaagaacgatttgttagagaatctgaaaaagcattctcgctacaaaactatgttcaagtttgaagaagatcatattgtgatttcttcacaaaaagaagcagcggcatttattaaaatgttgaacgatgatattgttcggtctgaacttacaggaaaagaatatgacagttccagcaaaatgcttttgggtccagtgggagcaagtcaatga

SEQ ID NO: 95678 - DNA, 615 bp, Dysgonomonas mossii DSM 22836
atggctagtgaaaattcaaaagatattaacaatttgagaatcattccgcaaattggtttgtttataacatcatataccccattattccttattattattataaaagttattgcaaaaaattcagactttttatattggggcggatttaattggtactctttccaaacgtttctttcgaagtttggtttagttacaggtgctactcttataattttactcagttttctaatagtaaagctaacattaatgaatttagaagcctcaatcgataatggttttttagttagagttaataatgtgaataataaaagttctgagataattagttacattgccacatacattattccatttgtatatgatgctaatgaaccgctcgattttctaataatgttcttacttattgcaattatatttgctatatatatcaattctccattactgattgtaaatccaattttaggtctaaaatatggaatatatgaagttacatttatgcaaaacggagcttcaaaatctgcaattgttttatcaaaagacaaatatttattagaaggaaatgtaataaaattattatcaataggccataaaatttattattcaaaaaaaatctga

SEQ ID NO: 95679 - DNA, 1032 bp, Dysgonomonas mossii DSM 22836
atgttgcaagaattattaaatgacattaaagattcggacaaaaaaaatctatgcctttttttcataaatcgtacactaaaaccgaacgtaagaagtagagacagagtcttagaaaagtatgattataaagtctttcaggtaaatatagatgatgaaatcaggagttacttgtattctttaagcttagagcaaatagagtacgctataaagaaaaagtttgatattgttgaatatgatattatatcagacagtacggatcaactatatacataccaaatgatcaataaaacaatgtcatttgtatctgttgtaaatgatcaattaccagatagatcttcaatacctcagctacaaaaccttagcgaactaattgaaatagggtcactttgggcttattgcgtaggatatttacccgatattgctaaaccagaagactggatatatacttttagaaagattgcaaatactaaacttgtaattgacgaaaaagatgcagataataaaaccataaagcaaaaattcataagagtattctttaataataaaagcaataaattgcaatttttacatggcgaaacaattacattagacaaacaaatagattgtatctataaagtagacacattctacatcttaaagaagagggagtttgaaaggatggtaggtcttgaagaagattttaaacagcaagcagaagaaacaattgacaaaatggctgaaactaatatgtttaaagggctcgattttataagaaaagaaatagaggaatctccatcaatacataagaagctgataaaaatacaaaaacttgagacttaccaagggttaaaacagtcagatataaaaaggatggaaaaaacagctcgtctatttgggagtaagcttaaaacggatgacggtaaaattgtcattgaagataaggctgacattgaacttgcaataagattattatgtgaatattacaaagaagggatggttacaaagaaaaaatttggtacttattcaggtaaaataatgaaaacttcagaataa

SEQ ID NO: 95680 - DNA, 546 bp, Parvimonas sp. oral taxon 110 str. F0139
atgaatttactttttaaaatattattattattttcctcatatataccagtaataataatgatatttttaaataatttaaaatcttttactttatatgaaatacttaatgtttacaatctaaatagctatttttggaatttatgtttaatattatcttttatttctattatagtattatttttgtggctaaaaattttaaaaaaagatgcaaaaagttctacaagactttatgaattaggtagtttggataataatgatggagaagttttaaattactttgtaacttatataattccattattatctcttaaagttaatgaaactccttctataataatgaatctattattgattcttatagagggaatatatttcataaaaaataatgctttacattttaatcctctattactgatatttggatatcatgtatatactgatactaataataatatagtaatatcgaaaaaaaatttatttacaataaaaaatgaaaatcttaaagctgatcaatttggtactagcaatatattttatattgattaa

SEQ ID NO: 95681 - DNA, 603 bp, Parvimonas sp. oral taxon 110 str. F0139
gtgtatttagcactaggtcaaattgaaaagttagataccaaaccctataatccagtaggttcacttgataaaacaattgaatttactaatactaaagaatttgaatgtgtaaaatttttaataaatagtctagaaactcccacaagtagtgatgatttagaatcagaaaatattaattttttaatttatgaatttattcctaaagatgatgaagataatgacaatgaaaatatatataaagataaaaatttttattttataagaaaacacattaaattacaagtttttaaaaagggatttatgggttacatttttaaaaataatttcaaaaaaatagaaaatacaaatttagtaggcatagattcttatattgatttaattatatgtgacaatgaaatcgtagtagttaatcattcatcatttgagagaattttcgatttacataaaacttttgaagatgcagcaaaaaaagtactaagtaatcctaaattaaaagctaatatagaaaattttaatgaattagagaatggcatacttagtaatttaagttatataaaaagagtttctaaattattagaaaaaccaaattctttaattttttag

SEQ ID NO: 95682 - DNA, 516 bp, Escherichia coli 96.0497
atgttaaataagcttgccaaatatcttcttactgccagctcagttgctccggtattttttaccttagcttttctttcatgtatatcaaaacactataaatttatgattgcttacttatcattgtgtgcaattatacttttactgtgtgttttgattgttaaatacgcaattaaatataattctgtaaccagtaaaaaattaactaccgcctctccagcagataaggagataacaaattatttcttaacctatttatttcccttaatcagtggtccagatgcatttatggatattaggattgcttctttctttgctgtgagtttatttttttacatcagtttttcaggttcctacagtttcaacccattattatcattttggggatataaatattatgaagccgaagacgatacaggcgtaagctttgttatattatcgaaaaagccactgttaaaagcatcaggcaatcgtgttaatttgattaagcttactgattacacatatatagcaatatag

SEQ ID NO: 95683 - DNA, 894 bp, Escherichia coli 96.0497
atggaactgtttgcaataacagataatacagttggcacacgcattgtaaaaattgttactgacaggccgactcaaaatgtaatcacacagctattcaatgaacaaaaaactttttttgaagaacgctatacagaaggcgtagaattttcaggtggctacatcactagtggagatgagttttttgtcattcctgactttgatgatgttatcgctgtattagatgctattaataatcccacaactatccctccatgggagccggaagaaatatcagtcttcaatataatcgctctgttttcaggctatcctgaagaggatggaaaacctgcaactgccttaatccaaagcttcgataaaaggcaagttattgataacagaagaacaattttccaaaaaccatttcaggcaagcaataccttttgccagtctactgagcatggtatagtcatcgacaataagctaacagctattcttgcaggtacagaattaaagtttaaaagcttccatatgctccgcaggatatttgatgtagatgcttatttcagagaagccactaatgaagaattaacaagtttttcttctcatgaaaaattttcagtagctccgggttttgatttaacaacaattgctgactctgttattagaaagaaagtttccttgattaataaatcaagaatacttgaggactactctgtgactgagttaagaatatcagcggctgaaattggtgttgttctagaaactgaaaaaatcggtgaattagaaaaaataaaaatgccgcaaataagaaaagatgtaaaaagattattgcattttttagatgaggactatttcacatcccatataaccagaacgctatatcgcgcaaactctaaacgtcgagaagatgtttaa

SEQ ID NO: 95684 - DNA, 591 bp, Arcobacter butzleri 7h1h
atgaaaaataaactattatttaaaatagctcttttcaacttatctcttattcctctgtacttgatatttattatccagtatatagatatatcaactattttaaatttttcagagtatgaaaatatagcaatgtttggcaaagaattattgattataaatattaagattttattttttattttgctgattataataggatttttaagtttactagttttcaataaaaacaacaattacaatagagaaaatgcaaaaaagtttgaatcggtagaatcaaaagattttgatcatctaacttttttgtcaacatatgtattgcctcttatcacttttaatctaaacgatactcatagcttcatagtgttgatttttcttattgttatgataggagctatatatattaaatcaaatctttattatttgaaccccacactacttctttttggatacaaaatatataaagcaaaagattcacaaaataatattgtccttatatctaaaactacacttttatcaagttgtataaattctagatatgtagatttaggaaacaatatctattttttaaaggataatgatgaatgtagataa

SEQ ID NO: 95685 - DNA, 939 bp, Arcobacter butzleri 7h1h
atgaatgtagataatcttaaatcaattttgcaagagatattaaactcagatgttgcaaacataaagttatatgccactacaaagcaaaacgaaacaaaaaaaatatctatctcaagtgatgtatcagataatttactagagctttttaaaaagagtatagaagatatgtttttagatgatagcaaagagtatagattaaaatcaattgacgataacaatgatgaagcagcaaaaacatactactattttaatggtgaaaacacttacgaaagactaaatgtattacacaatctaagttcactagatgaggaagtctttaattttgaaaatacaaacttagatgatatagaaacattttacatcactatctcaaatggtgaaaaaactatagcactatacaaaaaaaactatgccataaatgttttaagaagaggaaaaacaattttctttactaaacacaatgaaaacatcgatgaattaaaaaaagatatattaaaaatagatcatagttttcagtttatggctattgaaaataatatactcatagtaaatctttctatgctagaaacacaacttggatatgatgaagtaatcacaaagaaagcacaagaaacagtagaactaatagcttcactagactttttagaagatatagccaaactagaagagatggtacaaacaaagaaaatagccaaaaaaataaatctagtaaaaaactcacaagttttagacataattcagtcagatataaacaaagttaaaactttcattgatagtattgaggatttgaaaaaaagtttaaagtttacagaagataataagctaaagctaaatagtaaagtaggagttgaaaggtttttgaagctgctagatgatgcatatttaaaatcagaacttacagagacgctttatgatagcttgaataaggagaagatgtaa

SEQ ID NO: 95686 - DNA, 570 bp, Halopiger xanaduensis SH-6
atggggcgtattccgagctgggcgaagatcgtcctgttcctgagctcctatagcccgctcttcgctatcgtcgccctccgcgcccacgattcgacccactcggttttcgggtaccaactggagcccgtcggaatcgggcctgttgagttatcctatttttcgctcggtttctcggctctcaccgtggttagcgtcgtcttcttggctctgatgatacggatgaatcgcacgagacagggccagttgagcgaaatcgagcactaccgaaatcggtcggatatgttcacagaatacctcttagtctacatcttcccgttcatcgtgttcgagttctcgaacatatacgatgtagcagcatttctcgtgctatttctcacggtcgccgcgatcgtgatccgctctaaccgcttgttcgttaatccggttctgatcggcttccgctaccgcgtctacgaaatcgaaactgagcacgacagacgaatcctcctcaccaagcaggaattgagtgggaacgacatgacactcaataccgcaagaataagtagtgatgtctatatcaccacaagataa

SEQ ID NO: 95687 - DNA, 1011 bp, Halopiger xanaduensis SH-6
atgagttcagcgagccgagttgacgctcgagaccacttcgacgaactggttgcatttctccaacggatcgaagacatcgacaccagcgaactcgggatcgacctgctgctggctcgtctgaacgaggaaagtgctgaagactacgactacacgtttgagcgtatttcgttagatcaagagctcccagaggacttggagaatttggtgcgtgataaggtcgagcataagcaatcagcgctcgaaagcgacaacattcgattctcggattacggcatcgaaaatcgcgatcgcgaccagaccttcgttcagtacgaacccacggagaacatccctcagttcgataacttcgaacgcctgctggagggacagcggtttagtcacacgacatatacggagccgccgaaacccgaattccaagcgatccgtattcgagatgccgacaacgaccagatggcgattgcctttctaaactacagtcggcgccagattatgggtcgaacgtctcgtgctcgtatgctggtcggaagtgagaaacaccggaaagtggatgactcgttgatctcgatccctgaccgcgtggattccatctactacgatggaatgatgtacattttcgaccagtctcggttcgagaagatattcgattatctcgcggagtatgagcggtgtgcggatgacgtcatagaccgaatcgaagaaacggacatccccttccacgactttgagatgttcaaggaggcagtgtacgggaacaaccgtgtgctgagactgatgtacaaggtacacgaacgcggcgtgtacgaagatatggatttagacgacgcggcgtatatccgcgacaacttcgataccgacgtgaaattcgaggagaacggtgacggagagatgtccattaaaatggacgataaacgagatgtgtgggctgttctccgtttcttcaacgacgatcacctcgactcgccccttacgaatgagcagtacatctcgctctcaaagcaagatgctggatag

SEQ ID NO: 95688 - DNA, 591 bp, Prevotella multisaccharivorax DSM 17128
atggtaagttttgttcctaaatttttgtttacagctacggtaacggcaccagtattcttgtcacttggattaattggcatcataaaggatagtaagaattattttcaatattggaataagctgctagaaaataacataatccctaatagttttgaatggtggagcataaatataagttttgcatttatgctaatatgccttattggcattaagatattccttcgcaaaaaatcttgtaaatgtgggaaaggaaaaacgattaaggcacagttttattcaaatctgtctcaaaacagtgctgaacaggtaatatcatcaataattccttggctgactatatttgctgacagacttgattttatggtattatttgtgtgtataatacttcagtgttgttttattgcaattgcaagttataataacaataactataatttattgtgttcaatatggggatatcgttattatgaggtaaaaacggaagaaaacacatatattcttatttccaaaaaatgtattagaaataagaatgaaatcaaaacgtttgttgagttgacagattatatgggtctaatcattaatgacaaataa

SEQ ID NO: 95689 - DNA, 852 bp, Prevotella multisaccharivorax DSM 17128
atgagccaattttacgcattgatgcacgacaatactgtaaagtatatatctctaaaagaagagattgtaaccgatgttagaaatctctttataaacggaggtgctatattaaaacctgaaggtatagaagaggatgtatttgatggtaatatcgtaagccgaaatggggaaaatattacgtatgtcaattataacttaccagaagattttattcatataccagataatcaagctgacatgtccgaatataatataaatgaggacatacctaaaagtatattttattacgatgacgggaaaatttattttcaggtttttaacaagaagaatatgttacaacgtaaaatggtcttacagtttgagcatgggaacgtatttactaaaatgaataacacagcttttattgttgaggataaagttcatgctatatacgaggatgggaagttgtatttccagaattatacaattgcaaatcagatattctcattaatagatttcatcaccgaagccacaaatactgaaattgaatcctttggagagatagaaggcatcaatgtaagtacagaaaacataaaacatattgcgaatataaagactcgtcgacttataaaattattatccaatacagataatattgcaacttttatgagaaaggcatctcgaacaagaactagtcttttaaggaaatatggagtaaacgcacaaatcaacgaaaacaatgaattagtattactaactaataatgttgcagatttgaatcgcgtcttggaatttcttaatgaagatatatttagaggagtaatcaccgatagcctttaccgatcaaattcaaagaaaaaagataatcattaa

SEQ ID NO: 95690 - DNA, 558 bp, Bacteroides sp. 2_1_56FAA
atgggatataagaataacgatttaaagaaaggagctaaatttgctttattcgtatcttcatatttaccattatttatattggtaatactcaggcaactttcggataactataattatctccactggggaggaatatcaataaatagtattaaaatatttctatctttctttggcttatcaagtgtactaactttggtctctatattgggaattatcggattgtataatacattgaaaaatattgaagatatatcagaaaatggatttaatgcgcaaattattgatattaagaataaaaacagtgaatctatcggatatatagcaacttatataattccttttctatttcaaagccttaatgggtggtatgaagggatttctatcttatttttaatgggtattatatataggatatatataaattcatcaatgatattaataaatccaattcttagttgtaaatattctatttatgatattgagtattctaagaacaaaaaattaaaaacggatttatcatatcaaaagataattcgttacaggatgaagataaaataa

SEQ ID NO: 95691 - DNA, 1032 bp, Bacteroides sp. 2_1_56FAA
atgatattagaagatttacttgagagattggaggatatagaggttagtgatacatatctctattttataacgcgagttttaaaacagaatcagaaaaaaaatagcaaagttctggataaatatctttttaaagtatatcaagttgatataaatgatgaaatccgtaatcatttatattccttgacgcaagaacaattatcgtatctcattaataaaaaaactgaggtacatgaatatgatgttattacagatgatacgcaacatttgttcacttattctatgacaaataaagtaatgtcatttgcagatgttgttaataaccagttaaaagcaattccacctaaaatcacaagtcttgaagaaataattgaaaatgaagaactatgggcttattgtgtaggatttcaaaaccaagacgaagataatattttcacatttcggaaaattcttgcaggaaaagtcgctattgatgaaaaagacagtaacaatcggaaatggattcctaaggcactaagaactgtcttcaataccaaaagccaaaaattagagttgatacaaggagaaaccgtcaatcttgacaaacaagtagattgtttatattataatgatattttctatatcgctaagaaaactcaatttgaacagatagttggattggaagaggaatataaaaagcaagcaaaagaagttttaactcaacttgaagaaactaagatgattacaggtttagagattatcaaccaacaaattgaatctaatccatcaatccataaaaaactggttcgacttaccaaaatcgggaattacaaaggaattgacaccaaagccataaacaaaatgcaacggatttgcaagaaatatggtaatcaattgaatgttaaggatggaaaactccatatagaatcagaaaatgatatagatttaacattaaagatgttagcagactactataaaaaaggagaagtttccggaaaagcatatgggacatatgctggaaaagaaataaaagaagtaaaacctatagaaaaataa

SEQ ID NO: 95692 - DNA, 603 bp, Lachnospiraceae bacterium 5_1_57FAA
ttgagaagaataatattatttgtatcttcttatattccgttgtacgtactgttgattatcaaaaatattttggaacgatgtacgaatgaaggaaaaatcacattaactttaaatcaactgaagacgtcacattattttgatgagataaatgattatgcaattgtaatattattgtttttgtgcattggatcattcttatatttaaaacttcttacaaagaaaactgaaggtgtgcattactatgaaataattaacatagaagatcaaacgggaaatatgtattttaactatatttctatttatttgctatcttgtttagggttgacactaaatagtatagtagacgtgttcgtattgcttttccttatgataattgttggatatatttatatttctaatcatatgacatatatgaatccggttcttcaattcttaggatttaaaatatatgaaggtaatgtaaagtcggaaagtacaggaaaagaaatacactcgattattattgttaacaacaaaactgtgattaaacctggaggttcatataaaggaggaggaaaggaagattttatatttgttataggggaatcggattctgagaaataa

SEQ ID NO: 95693 - DNA, 975 bp, Lachnospiraceae bacterium 5_1_57FAA
atgaaaaaagatgatataaaaaaagagttatctatctataagtcggcaatagagaatggtacagccgaaataaatgttatgtttgttgatcaaaataatcaacgaaagaaacgatacaaaggcttaatgttaaaaacaaaacttgatgatttgaagtcagtgcttatagattcttttgcttatgtgatagatgaattggataaaagaactttagatatctatgatttggaaatatcagttgatgaatcaacgcagatggtttcaaaaaatgatgttattcatggcaatgaaattctggatgaaattactgttgattatacggaagataatgttgtaactgaaaatacaaatctttctaaaattaaatttatggttattcagatttatactaaaaagaaatctttatatttattcaaaaagtatgtgcagccttcaacggcttataaaacaagcgaaaaatatgtattttcgggcggcatattaaagccattcatggaagaaattattacaattaattctttggtggatgcgatattgcttgacgaaatatattatgtatttaatagaaacacattcaattctatctttgcatataaagatgtttttgccaaaattttaaatgataatgcggatatgattcgtgatagtggactattaacagaggctgatcaatttgtatctgactgtgaatcagatggcagatacttaacaaggctaacaaaagttattttagctaaaggttttgatgaagttagtaagaagaaaacggaaatcccaagtgtaattaaagagtttaatctttctttaaaaacttctgcagaaggcgaaatcgtttacaggggtaaagaagatatcccggaattgttgaacctcttgcttagacattatgttattgatgcacttacaagtaataaaatgattgcggctgcaattcaagaatatcaggcgggaaatagagggggtagcaatagttga

SEQ ID NO: 95694 - DNA, 651 bp, Lactobacillus johnsonii pf01
atgaaacaccatgatgaaattaaaaataggcttacattaactatacaatcttttttccctctttttgtctggttcatcatcaaatattctgtaaatcctaaaaaatttataatcaaaatagagaaagatattttgctatataaatggaatgtagatgtttattttagattggcaatgagacaatattttttgtctggtttaattactgttatctcttttgtattatgtttgtatattgtatacgaactagtaaatattagagagaaagaatctggtggatgggataatgatggtgaaaatttgaagattatcagacaaaaaaatgatgtaggggttacttttttagtaacatatgtttttccgctatttattgatgatataaatacaattcgaaattttattattttagtgtctatgataatattcttaattttattgttgttaagaacgaatttatattatcaaaatccaatcttgataatgttgggatataaaatttatgttgtacaaataaataacccagaaaataggaatttgttgaataaagaaataatagctatttcaagagaaaacctggttgaaggtcgagtcattaagaagaaaaagttatcagataatgtctatttgatgaaattaaaagaaagacagtaa

SEQ ID NO: 95695 - DNA, 972 bp, Lactobacillus johnsonii pf01
atgatggatgttaataagataaaagaaaaaataagagatatgttttgcgataaagagtttggttttgaagtttatattttcatgaaagatgaaagcttgagacactttttattttcagataagaaaagaaataaaaaaaacataatttttgaacaaagtacgcaagacatgattgtaaaaactttaaaaaatacattttgtagagaggatattctttatattgatgctgttaacgtttcagatgatcagcaaggctgctatgtgattgaacaaaaagataaaagttacgcaccatttgaatttttgaatagacagttaaataatggggccactaaattaaattttaaagttaataatgtatcagaagcacaaggaatattctttaaatttagaagaaataatgaagtaatatgggcatatcaaaaaatatgggctgtaaatattccaaataaatctaagaaaaataaaatattccgacaaaatgatgatgacgaattcgaagaattagataatcaaatgtttgttataactccaagtataaacttattaatagttgataaatacattttgaccaacaaaataaattttttagaaagatattttgactttgaattctatataagagctcacgctagtgacgcagttaaaaatataagagcaacaaatttaatcactgaagataagaagaacatattggacaaatacattgagaatgtacgaaaattccatgctaaaaaaatgatgaaggttacccaatttgaggtgatgagattgtctgctgaacagttaaaagaacagatagaaaaaagtaaaaaatggaagaatgtatttacttttaatgacgaagataaaataaatttaaatacttttaaggatgtagataatttaattgatttgttgacagaacgttttacttcatctccaattactggagatatatttgatacaaaagtaaaatcattggtaaaataa

SEQ ID NO: 95696 - DNA, 474 bp, Streptococcus equi subsp. zooepidemicus ATCC 35246
atgccgtttattttagcgattggacttagtaaaacttttatcgaaaaaaactttaaaacaggtcttactataacggttatatcatttggtctagcggctatacaagtaataatactaagaactgctaaaaaaaatattgtcccacaaaggataaatatctcaaagataagtcaagagaaagaaagctgggtattagcgatatatgtctcatattttgtgcctttcatagaaagtagctttggaaagaattttaattttaccaattggatactggttgtaataggcataataatactgattttaagtaaaaggacgacaaataatcctgttttaagtgttctcgggtacaaggtttattctatcgaaaccgatcatggaatagatatgactttgattagtaaacgagatataagaaataaaaaagctatagataaagttcttaggatttttgaatattatgttatggaggcttga

SEQ ID NO: 95697 - DNA, 852 bp, Streptococcus equi subsp. zooepidemicus ATCC 35246
atgagtggagtatttataatagatgataataaagtatctataaaaaaattggagactgataacagtaccgttattagcatcaatggaattttatcagttgacacagaaaaatataaggcaaattctgtaaactttgatggctcttataaacctgatgaagatgagagtttgaaaattgaaaactttgatctaccggatgaaataaaagaggcaataaataatccgttaggtgtagagaaactaattgcaacagataatgaccttaatatacgtgcagtatttttaacattagatgatggagaagagggaagaatcgtttttcaaaggacgcagaaaagacaattgttattaggaggaaggataaccttattttggaataaggatacattcatttctacaaaaaaaccgggggttgttattaccgatagcatagatgcgtattatgaaaatggaactctttatttcaaatcatattatttggcgaatcagatattaaatttaaacaaatattatagacaagctacagatgaggatattagaacattttgtcaaagtagttgtttttatgttaatgatttagattctctggttagtgccagcaacaattggacgagaaaaaagattgcttatattcttgatacgaaggtattagagacgaattcaatagattttatacttcaagatgccaaagaattgggattacagtttcaaacgaatggagaaaataagattgtattcccagaagatttaaaggctcaaaaagagttattatcatatttagcagatgaaatatataaagggcgcctgacagatgatgtatatttgacaaattccaaaagaactttgaaatga

SEQ ID NO: 95698 - DNA, 615 bp, Advenella kashmirensis WT001
gtggcccaacgtgaaacgagtgctgcgatgagtgatccatctctgaggctacgcccgctggtgtcgttattgttgttcctgagcgcatattcacctttgttgattatcttagtcatcaaggatattgatcttcacagcccaatatttttccgatctccggtccttagcggcatcttcctcttgatagcagtgggcagtagtgtgattacactcagggccgtgaaggaaatcgatggaggacttccggttgtcattaccaaggcggcgaacaggtccggtgatatgtttgggtatacgattccctatatgttgacgttcatgcgtatcgacctgggagattggcaaaccgtgcttagccttgccattctcctgagtattttgttcatcatggcttatcgtacgcagactgtgtttattaatccaattcttgcgatagccggatacatgctgatcgattgcacatttaaacggggcgagaaagaaacccaggccatggtgatcacgcgggcgccgatcagcgcgggggactcatgtcgattggagcgtctttcgcactatctttacatcgccgcacaaccagagcccaaacagtcgggggaacaggatgagcagtaa

SEQ ID NO: 95699 - DNA, 951 bp, Advenella kashmirensis WT001
atgagcagtaataaggccaaaagacaactagcagagataaaatctttcgactttagcaagtggtcagtaaccttttggttagtcaaaagaaagatcgttcagaaggaggcaagttatgcagtgcttcgcgttaatatcgacgtgaaactgcagcagcgtttccgaggatatctgaaggtgcaattgcaagacaaggagttccatgtctcggcgtacgacttcaacaatgcggatggcgacgacgtgctgttcactatagcgacagaaactaccgactttgtgaaggtcgccgcgatgattaacgatgactttaacaacccacatgccaagaactacgaagaactgctcaattcctgggcctacatcgtattgttcgagaaagacggaaagcgatttttcacttggcggaaaattaatgctgacacgcaaccaaagaaagtgaagtcaaagaatgcgacgttttttcaggaccacaaactggtagatctcgaagacaaggaagtattcctgatcgatccgcaatacgatttctttgtttacgaaggcattactttcattgccaacaaaaggcaatttgaaagcgccatgaattttcgagaagggatgaaagcaaacggcgctgaggtgctggctgacttcgagaaactaaatatctttgacaatgtggagatcatcaaggagttcgttggttcaaatctgcaccatctgagaaaactctcatccatccgcaaatctgggtactacaagcaacccgactatatgcagaagctgattgaggttaataataccgaaaaatgggagctgcagatcgtcaagaataagattattgttgagaaggaaacggtcgaattgctgcttaaactactgaataatgacaggttgcgttctcccatcaaccatgagctatttgactctgccgcaaaggctcccgtggcgcaggggggcgagtaa

SEQ ID NO: 95700 - DNA, 576 bp, Streptococcus mitis bv. 2 str. SK95
atgcagcgagatcttttttctaagtggacattgttcatcacttcatatttgccattatatttatggcttcttttgagtaacattaactattcaaagttttcatttgaaagattagtagcttttgattttgaacataaattaatacgaaccgtttttgttattctaatttttgtttcagttgtcaaattatggaaattatttaagtttgacggtaaggaaagtatcaaaataccgagaaagatggaaatatcaccggaaagtgattcattgatgaactacattgttacgtattttactccgttactgtcttttgatatgaataatacaactagtattatcatgaatttattgttatttcttttaattggattaatgtatgttggtagtaatgcaagttatctaaatcctgttctaggagttttcgggtttaagatatttggagttacaggttttccgcacgctcatcatatcataacaaatctctcatttgatgatatagaaaccgtgagagaaacagatgtagaattaactagttatagattaggtgatggaatttatattataaaaagaaaatag

SEQ ID NO: 95701 - DNA, 978 bp, Streptococcus mitis bv. 2 str. SK95
ttgattccaataaatattaatgatgaaaaaaacgggttgacttcttttagtcaacaaccagattttgatgaatatgttaagatttttctaattaaaattaagaaaaatgagatttttttatataaacaagatgctgataaaaaaactaaagaaactgtgataaaatcaattattgaaagtatgggtcaatctatttttagtaatcgagaaataaagccatatgatccggtcgtaacgtataagaatgtacatgagcaagtagaggtgtcgaactacggaaatattcaatctgtaatttcaaaatttaatgatgaacaacaacatctacttagttcgagtagtgaaactgaaaaaacattacacaattatttggttatcataaaaaaggatgatttaattaatcttaaattcattggttcgtttgtaaatgcatttcagttagaaaaaaagtggattattggtaattttacggataataaaattaatctacgtaatcaaaataacctatttggtttgaataagaagattgatttgatgattgtcaatgatgataaaattttaatcaatcaagctgaatcaaaatttgattctatatttggaatgaatcaaaaatttgctgagcaagcaacagaaattctaaatactaatgcaaatataaaaactatatttgaacaagcttcaattaattttttgaaaacaaaagtgatcaatggtaaaagacttgctacgaggttaattaaaattgtttctgatacgaatcgttttacagaaacagttaaacatattgacaaaatacaaactataaaaaatgattctaatcataaattttataaagcaattgaaggggttacgttcagtaatggaaagctaagtattactgatgagaaaaattgtgttcaattgattaatgctatatcagatgctcttgtaacagcttatatttctgaaattgaaacggttgaagaaggacgtatgtaa

SEQ ID NO: 95702 - DNA, 549 bp, halophilic archaeon DL31
atgattgaatttcgaccgtggattaagggagggctcttccttagttcatatattccgttctatctaattatggccttgatgaactggtcggcagttatcgatttatctttcatacagttccacgctggcttgttttttgtgttgctcactatcgtgtccggtataatactagcaatctcaattcgttttcgcaagggtcgtgaaccaagtagaactcacattggtacagtcaatcgaaaaaacgagctccttaccgggtatctcgtaacctacctttttccgttcctgaatatggacttagaggtcgttcaaaattgggtggccctcatgctgttttttctcgttttaggcattattcagtacaggtcgtcacagcttcacgtgaatcccgtcctgaccgcttttgggtacgatatctatgaaattgaggaggcagataccggggacattctacttctcattgctccgaaatcggaggtcgtccgaggaagtggcgatgtatatacagtaaagatgggcccagagacccgtctagccatttctccttga

SEQ ID NO: 95703 - DNA, 1041 bp, halophilic archaeon DL31
atgtcaagcggagatgcggacgttcaaacccgtctagaggatattcgggactacatttggaatcaagacgacggagaagaagggtctccaaagacagttagcgacgatcgacttcgcgacttcattattgggaaagaccacgaagagtcgatttcggaatttgactatgaattgggagaggttgacctacctcctgaatctctcaactcactacatacactagtcaatacacagatttcataccatatcgggagattggaagccaacaaagtgtctacgactccgtatggggagggattaggagatcgggattatgtcaaatatattacgtcatcaaaactgcctgttctcggagattttgaagacatctttaccgaggaggatttgccgtcaaagagatacgaaagtctgaatcctgactttcaagctatcagaatcaggggtcctgatgacctcgtgatagggtttcaacattactgggggaatcaactattgggcaatacgagcctattcaactttctgactaaagaaggggacttcgaaccaattgatgatcccattatttcggttccaaagcgacttgatgcggtctatcacgacgaggttctatatatcttcgatgactggaggtttgaacaaatctttggctattaccgagcgtatgaggaagtttctgaagaggtaatgaatactctcgaagactcagaaatcatgtttgagaacatggagacagtagaaaaggcgatattagataacccgaacatgatgaggaaggtgagcgatgttcagagaaatggggtctatgagaatctgagcatggatgatgttgaatgggtgattggccagcaccctgaggcacttgagggggttaatgtagtggatgacgacggagagcggaagattcaggtagagaacaggacagaggtctggggactcgttcacatcctcaatgacgatcacgtggtttccgagttggccgaacgtgtgcctgagttaagtgaccgagtgtatcgtgcatcgaaaaaggaagaaatctcataa

SEQ ID NO: 95704 - DNA, 516 bp, Escherichia coli STEC_B2F1; identical to SEQ ID NO: 95682

SEQ ID NO: 95705 - DNA, 894 bp, Escherichia coli STEC_B2F1; identical to SEQ ID NO: 95683

SEQ ID NO: 95706 - DNA, 375 bp, Xanthomonas axonopodis pv. citrumelo F1
atggtggtggtgctccgctcggttcggctgacgcaccgcgtgcacgtgcaggaagtgaaggctattcccaatgacctaattaactacgtgctgccgtatgtggtgtcttttatgggtctgagctatggggatccgcaaaagctcggcggttttctggtcttttggattgggctgttcgtcattacgtatcgatccggtcagattttgatgaacccactgctgatcgtgatgggctggaaactctacgaggctaaggttgccttaggccaagtcggtgccgttcgaatagttagggtcttgaaaaaaggtgcgcttttgcccagtatccagatagccgaagaaatacaggacgtttatctaatgggggatccatga

SEQ ID NO: 95707 - DNA, 492 bp, Xanthomonas axonopodis pv. citrumelo F1
atggcgttccaaaacggcgcgctcagtgccgtgcaggaagtggattttaccttggagccgggatttgatctgtttgccttggatgactcgttgctcgtaggtaataagcgtgcctttgagtcaatgatgaaatatcgtgctggctttgttgacgcgtttgttgagcttcaggaggaaaaaaagttcatttcccttttcaccgacatggcgcctttggtcgctcatgtcgggcttaatggcactcacttgcgccgcatggcggtcattcaagagcgtaggctatacgaaaaccccaaatatctggggacgctgcgcgaggtgtgtgaaagacacaactggggaattcagtttgatgccgaaggattgatcatcccaaccgaggaaaccgcaagggtgataatgacgctgcttctagatcagcgcctgatcagcgagatcaccgcaatcatgtatgacgtgccaggcggtcatcgtgtggatgcggctcagtaa

SEQ ID NO: 95708 - DNA, 582 bp, Aggregatibacter aphrophilus ATCC 33389
atggctgattcatctttaagattaagaccatgggtctcgttaattctttttattagtgcatattctccattaatggtgattatggcaattaaacaaatagatttgacaagtccaaactattttaattctccagaaatcggaattggcttattagttgcagcaataattagcagcatcattgtgttgcaagtggttaaaagcgtccgaagtggattaatggttgtcgtgagtaaggcatcgaataagtcaggagatatgtttggatatacaattccttatatgatgtcttttatgcggattgacttaactgattggcaaacaatattggcgattatattatttttgactgtattgttcactatggcttatcgaacaaaaacagtatttatcaatcctatcttggctatttttggatatatgttgattgattgtacatttaagcgaggggaaaaggaggtgcaagcaatggttattactaagcaacccattagctatggtgatacagtttgtttggataggctttctcattatctatatattcgttcaaactctgactataagaatgataaggaaaaatcatga

SEQ ID NO: 95709 - DNA, 945 bp, Aggregatibacter aphrophilus ATCC 33389
atgagcacaaacactaaaaaacaaattaaagaaatacaagcagaaaattttaacgattggtctgtatcattctggctgataaaaagaaaggctccaacaactatcaaagaagcttcgtatcatgcttggcgtgtcgatatggataaaaaattgcctactcgctttaaaggctacctgaaaaatcaacttcaagggaaaaagtttcatgttgagaaatatgattatagcaatgcagactgtgatgatgtattgctaacagttgattctggtatcacagattttgaaaaagttgaggcggaaataaataaaggttttgataatccaagagtagataatcataaagatctacttaattcatgggcctatgttattttgtttgaaaaagatgataaaaaattgtatgcctggaaaaaaatcaatacggacacgcagcctaaaaaggtggcttcaaaagggattctgttttttataaataaagaattggttgatcctgatgataaagaggtttttgttatttatccaaattatgatttttttgtttataaaagaacagtatttatagcgagcaaaaaacagtttgagagttcaatgaattttcgggaagggatgaagcgaaaatctgccgaagtgattgctgattttaaaaatcttgaaacttttaaaaatatagaattgattgagcagtatgttggtaataatctacatcacttacgaaaaatggcttctatattaaaatctggttattataaacaacctgattatcttaaaaaattaattgctgtcaataaaaaagaaaaatgggatttgaaggtggagaatgggcagattgtagttgaagaagaaacaatagatttattgttaaaactgcttaataacgatcgtttgcgctcacccatcaatgatgaaatatttgatgctgctgcaaaatccaaggttaataaataa

SEQ ID NO: 95710 - DNA, 582 bp, Aggregatibacter actinomycetemcomitans serotype a str. H5P1
atggctgattcatctttaagattaagaccttttgtatccctgatgctttttatcagtgcttatgcgcctttaatgcttattatactgattaaacaagtagattttaatatgccttactacttaaactctccgatagtcagtttgatattattaatagtggcagtatcaagtagcgtgataacgattttaactgcaaagagtgtgcgagctgggctgatggttacagtgagtaaagcgtctaataaatcaggagatatgttcggttatacaataccctatatgctttccttcatgagaattgatttgagtgaatggcaaaccataactgcaataattctatttttatcggtgttatttataatggcgtatcgaactcaaacggtttttattaatccgattttggctatttcaggatatatgttaattgattgtacatttaaacggcaggagaaagaaattcaagctatggtaataacaagagagcctattagtgcaggagattcagtttgcttggatcggctttcacattatttgtatattcgttctcaatcggactatcaaaataaagaggaatcagtatga

SEQ ID NO: 95711 - DNA, 942 bp, Aggregatibacter actinomycetemcomitans serotype a str. H5P1; identical to SEQ ID NO: 95629

SEQ ID NO: 95712 - DNA, 582 bp, Aggregatibacter actinomycetemcomitans serotype d str. I63B; identical to SEQ ID NO: 95710

SEQ ID NO: 95713 - DNA, 942 bp, Aggregatibacter actinomycetemcomitans serotype d str. I63B
atgaaagcacaaattaaaaagataatgaaagaaattaaagaagaggatttcaatagctggaaagcatcattttggctaatcaaaaggaagaaacatccaaaggataaaagcaattcatattcagcaatgcgcgttgatatagacgataaactgccaagaagattcagaggatatttaaagaaacaacggcaagataaaaaatatcatcttgaaagttatgattatagtaacgctgattgcgatgatgtgctgctgacaattgagtctgaaattaccgattttagcaagattgaaattgagattggtaaaggatttgataatgctagggcgacttcttattcggatctactaaactcatgggcatatgtggttctttttgaagaagataacaagaagctatatgcttggaaaaaaattagtgcagacacacagcccaaaaaagttgcatcgaaaaatactatatttttccataatcacaaattggttgatttggaagataaggaagtatttgtcatttatccaaattatgacttctttgtttatcaaagtattacatttatttccagcaagcgtcagtttgaaagttcaatgaatttcagggaaggaatgaaggagaagtctgatcaagtattgtctgattttcaaaatctttctgtttttaaaaatattgaattgattaaagaacatgttggagaaaatcttcatcgcttacggaaaatggcttccatcttgaagtcgggatactataaacagaccgattatattgaaaaattgatttccgtaagtaaggaagaaaattgggaactgaaagttgaagaaggtaaaattgttgttgaagaagaaacaatagatttattgctaaaactgctcaataacgatcgtttacgttctccaattaataatgaaacatttgatgcttctgcgaaatcgcgggttgactga

SEQ ID NO: 95714 - DNA, 582 bp, Aggregatibacter actinomycetemcomitans serotype e str. SCC393; identical to SEQ ID NO: 95710

SEQ ID NO: 95715 - DNA, 942 bp, Aggregatibacter actinomycetemcomitans serotype e str. SCC393
atgaaagcacaaattaaaaagataatgaaagaaattaaagaagaggatttcaatagctggaaagcatcattttggctaatcaaaaggaagaaacatccaaaggataaaagcaattcatattcagcaatgcgcgttgatatagacgataaactgccaagaagattcagaggatatttaaagaaacaactgcaagataaaaaatatcatcttgaaagttatgattatagtaacgctgattgcgatgatgtgctgctgacaattgagtctgaaattaccgattttagcaagattgaaattgagattggtaaaggatttgataatgctagggcgacttcttattcggatctactaaactcatgggcatatgtggttctttttgaagaagataacaagaagctatatgcttggaaaaaaattagtgcagacacacagcccaaaaaagttgcatcgaaaaatactatatttttccataatcacaaattggttgatttggaagataaggaagtatttgtcatttatccaaattatgacttctttgtttatcaaagtattacatttatttccagcaagcgtcagtttgaaagttcaatgaatttcagggaaggaatgaaggagaagtctgatcaagtattgtctgattttcaaaatctttctgtttttaaaaatattgaattgattaaagaacatgttggagaaaatcttcatcgcttacggaaaatggcttccatcttgaagtcgggatactataaacagaccgattatattgaaaaattgatttccgtaagtaaggaagaaaattgggaactgaaagttgaagaaggtaaaattgttgttgaagaagaaacaatagatttattgctaaaactgctcaataacgatcgtttacgttctccaattaataatgaaacatttgatgcttctgcgaaatcgcgggttgactga

SEQ ID NO: 95716 - DNA, 582 bp, Aggregatibacter actinomycetemcomitans serotype f str. D18P1; identical to SEQ ID NO: 95710

SEQ ID NO: 95717 - DNA, 942 bp, Aggregatibacter actinomycetemcomitans serotype f str. D18P1
atgaaagcacaaattaaaaagataatgaaagaaattaaagaagaggatttcaatagctggaaagcatcattttggctaatcaaaaggaagaaacatccaaaggataaaagcaattcatattcagcaatgcgcgttgatatagacgataaactgccaagaagattcagaggatatttaaagaaacaactgcaagataaaaaatatcatcttgaaagttatgattatagtaacgctgattgcgatgatgtgctgctgacaattgagtctgaaattaccgattttagcaagattgaaattgagatttgtaaaggatttgataatgctagggcgacttcttattcggatctactaaactcatgggcatatgtggttctttttgaagaagataacaagaagctatatgcttggaaaaaaattagtgcagacacacagcccaaaaaagttgcatcgaaaaatactatatttttccataatcacaaattggttgatttggaagataaggaagtatttgtcatttatccaaattatgacttctttgtttatcaaagtattacatttatttccagcaagcgtcagtttgaaagttcaatgaatttcagggaaggaatgaaggagaagtctgatcaagtattgtctgattttcaaaatctttctgtttttaaaaatattgaattgattaaagaacatgttggagaaaatcttcatcgcttacggaaaatggcttccatcttgaagtcgggatactataaacagaccgattatattgaaaaattgatttccgtaagtaaggaagaaaattgggaactgaaagttgaagaaggtaaaattgttgttgaagaagaaacaatagatttattgctaaaactgctcaataacgatcgtttacgttctccaattaataatgaaacatttgatgcttctgcgaaatcgcgggttgactga

SEQ ID NO: 95718 - DNA, 507 bp, Desulfobacter postgatei 2ac9
ttgagaaactggcttaaatccttattgtttgtttcagctttttcgccagcactattggctctagctggagtcaggtattattcaaagggcctggatacagttttttatcagttggtagtaattgcattgatcggtatcatcttaccattcttgattctttcactcataagaaaaaaagcagaaataatcaacttcaaagccaaaaaagttgaatctgcagattatttgcttcttgtatttattggaagttacatcgcacccataatcatgaaagtagcggaaataaactttgagatcacagcaatcattgttttaatcttattcttcgttgcatggattatttcttatattccaactcatcctcttttatacatagctaaattcagattttataaagtagagtctgatactggaatggtctatgtcctcatggcgagacgaatcataagaagtcctaaaagcatcaaagaagtaaaacaaatctctaacagtatgttaatggagtga

SEQ ID NO: 95719 - DNA, 882 bp, Desulfobacter postgatei 2ac9
atgcccttaaacctttttgcacttacaaacaacccttcaaaaagaattgtaaagtttgaattatcaaacgatgttcaagaggaattaacaaactatctcacagcacaagaaacaagatttactcaagctgaagaagaaatagaatttgatggaaagtacaagcctgatgatggagaaattcttttcattgacggctatgacgatattgatgacttatcatcagcagttgaaaacccattaagtccagaagtcgttgacccaacagaagatttttttgctgaaataaaagcacttttcactggatatacggcagagaatggaaatgtaagagtactacttcaaaattttgataaaagaaggataatctccacaaatggcttatctatttttcattcgtctaatgtttacaaaaaaattgagggtattgggttgaccattgaccataaacttacagcaactttagagagcgggaaattaaaatttttcagctttcacaatactcgccaaatgtttgatttgagtgaatactataaagttgccaccgatgatgatgtaagagaatttgcagctcttgatataataaagtcagaaaacactgaacaactaatcgagatttctgattcttgggttagaaggaaaatatctcttatccatcaaagtgggattttacaaaatgttccaataaatgagatgaagactgttgctactgaattcaatattccatttttgacagaaatggacgattcagaagaagtgataaaattgccagataataaacgagatctaaaaaaaatgttacgattccttgatgaagactactataaatcgccactttcaaacacagcatttgtgaccaattcaaaaagggtagttaccatctga

SEQ ID NO: 95720 - DNA, 648 bp, Desulfotomaculum gibsoniae DSM 7213
atgaacggcaacaggaaacttcgtaaattattgattttacaatcctttgtgccgctaatgtttcttcttttattaaagaattgtgaatttaacttgttcaatcttgtttgtaaatttttcattagaatttggaaacatgatttttcggcaattacaatcgctattactcatgaaaaatttttacttttaattgtagttgtggggtgtttattctggatattaaaaggcatattagccatgtttcaatttcgaaatgtacagaactcaaactttattgagggagataaaattgtaatcaaaaactactcatctgatgctggcttaattttttttactacctttattgtgcctcttgttttagatgatatcggcgaacttcgcaattcccttgtatttattggattgttaacgatgattattgcactaatgcataaaacgaatctatactaccaaaacccggtgctcacaatacttggatataaaacatttcaattttattttattgaagataataattcagctggaatgaataatgagttaattggtattacatacggaaaaattgacgaaagcaaaattattaaatatcaattagttgcagatgatgtctacctgatttataacaaaacgcaacatccaatacattaa

SEQ ID NO: 95721 - DNA, 975 bp, Desulfotomaculum gibsoniae DSM 7213
atgctaaaagatagaattttgcacgtaataaataatatgtttcaaaatactgaatatggattcgaagcatttgttattatgaaaaatgataatactttaaaacgtctagtattgtttgagggaaacccatcaaacttgtcaggtcaagcttctgaaaattttaaagaaaaggtaaataccactatagcggaatttattaaagaaaaatatttagcggatgatgccgaatacgaaccggtagaaaacatagccgataatcaaaataaattttacgtaatagagcaaaccgaccagtataggccttttgacatactaaatacgcctattaataatttacaaacatttaatatgacagaccgagataatgccctgggactcttgtttatgtttagacgtggtgataacaagatttggggatatcagcacatatatacagtaacaattcctaataagttaagaaaaaattggctatctattcaacaagctgaaacgtttaaagaaatgattctaccactatttccgattgctaagaaagtgaatttaataattattggacaagaaattaccaccaaagatatttcattaatgcaacgtcaatttggatttgaaacatatattaggaattcagctcagaccgttatcggggatgttagtgaaataggattgtttgaaaatattgaaaaactgtcatcgtatgtggaaagaagcaaactaacatatgctaaaaagatgatgaggattaggcactctgcagtacttagaatgtcctctgaacagttgctaaataaagttcaaacattacctcgatggtcaggcaaattcgtaattgaaaacaatagaattgttttaaagacatataatcatgtggaaaatctaattgatttgcttgatgaaagatatactcgttctgatgttacgggtgaagaatatagtacagacgtcaaaagactggcgccaccgatagaacaaaattaa

SEQ ID NO: 95722 - DNA, 528 bp, Peptostreptococcaceae bacterium ACC19a
atgtataaaatattaatgtttatttcttcttattttccgttatatatgataattataatcactaaatacagatatttaaatgaaagtaaaattggaaaattgtttttgttaattatttttataatgatgatgtcatctattattagtatgtttatagtattgacttcttcagccaacacatacagaaatatttcttctatagaaaaatcagatgactcagtaataagttatttaatgagttatgtaataccactttactctatacaagataatactattgaatatgtaatgatgaatacattattattttttattatatctgtattatacattagattagatttattatatcttaatccagtatttgccttacttggatatgtacactataattctgaaaattttgtaataatatctaatataaagtacatagatttaataaatgtgattaacaataaaaatgatttacatgtttatgaagttacagacactatttttttagcaagaaagaaagataataatatataa

SEQ ID NO: 95723 - DNA, 909 bp, Peptostreptococcaceae bacterium ACC19a
atggaaattaatagaataatcgaattgatagaaaaatcgaaaaatggcgatttatattttattaggaaaatgacagatgggtataaaagttataaacctagaacaagtgacacattaatagaaaaaataaccgatatgattttacattatttaaaatttttttcagaaaaagaacaaatagttttcaacccaatggggtacagagatgaaactattgagaaatataaagtaaaagatattgaagattacaaaagtttaattgaaagttttgaatatcccaaaatagaaggattagaaaaagaaattgataatcttaaaagttattgtatatcttatgacgtaatagataataaccaaaatgaaaaaatattgttattaagaagaataaataaattgaaaaaattaagaaacaatgggttcttgattcattttagaggagaagaattagttgatatagacgatgaagtttttggaatagataatgaaatagatttgataatttataaagatgaaattttaattttaaatcatatagctttagaaagaatatttgacttaacaatacaatataaaaataaagcaaaagaaacccttaagattttaagagataaggttaggatatcaaattttgataaatttgaagaagattgtttaaacgattctagatataaaaaagctttaacaaaaatgttgaatgaaaaagaattaattgaaaaaagttttgataatcatagaaatctcatagaaataattgatacttttgatttacaaattgaatacgaattatatccagaatttattttagtatatgaatacaagaatcaaataatggattttctaagaataatcagagattcttactatattagtattaatcaaaatagacctggatgtgatgaaaaaatttaa

SEQ ID NO: 95724 - DNA, 588 bp, Pseudoalteromonas sp. BSi20311
atgaagtttggtgaaatttgggacaaattcgaattatacataatgtcactttggtttctttttttcttaatcattgtgatcacagtagatattcctatgtgctttggtgataactgccaattcgtagggttttgggacgttattaaaaagaacatagttcctgctatttctttgctgttggttttatttggggttattttttattaccgctttgattacagggtttcaggtagtaaaaaattacctgttgaaattgtagatatagaagatctgaattacgagcaccttacatttctaaccacttatataatccctttaatctgctttaacctgacaagtacaagatatttgatagctttagcgtttttgttaattgtcatcggtattatttatgtaaaaactgataagttttatgccaacccgactcttgctgttttaggatttaggttatacaaagttacgattaaaacaagaaccggtataaaagaaaatattgttgtaataacaaaagacaggttgagtgagcttgatcaattaaaaaccctagatttagatgacaaagtatattttgcgaggaaagtcgaatga

SEQ ID NO: 95725 - DNA, 975 bp, Pseudoalteromonas sp. BSi20311
atgactattgaaaacttaaaggaagaaatttcatcggttataacagcgaaaggatgttctgctgaatttttctttcttttagatggcgatgaaggcatgtgtgttaaatctgttgatattaatgaagcagatcagacaaaattggcagaaatgtttacggagtcattgagtagtaatattctccttaatgatgatctgtcacttattccaatatcaagtgcagatgatcgaaaaaatgctttatacgaatatgatttagatgatatcccagatgaactttcgaacttaaaaaaaataattgaaagtgaaaaatttgatcctttctcatttagtgatgactcattaaagcaacttgaaggtgtgcttattctaattggtaatcaagacgttcaacttgccatttataaacatcactacccaataacattattacaaaaagatagtggctttagccttactaaaatgcgaggctcaaataggtttcagaaactagatcaagatattcttaaaattgatcctaagtttcagtttattaaattgaatggtaaatattatatcctcgatataaaagcattagagaggtttttcggtttccatgatgccattaaaaacattgctacacagggtgtagagaatattaaatcatctgatttagtaatggattgtggtgtgtttgaatctcgtcttgatgatataaccttttcaagaaagttagttaaatcggctagccaatcacctgttttatcagtaatacctaaccgtgaaatactatcctttacaaatactcacccagcattaaaaggtaagtttaaatatagtaccgatggctcgcaattcgatttaaaaactaaaaagtctcaaaacttatttcttaaactattaaacgacgattttttacaatctgaattaacgaagaaatactatgagagcgttgcaaaagataatattgaagaagctgctgaaaatgcagcgtaa

SEQ ID NO: 95726 - DNA, 600 bp, Leuconostoc citreum LBAE C11
atgataaaaataaatttgtttttaatatcgtacattcctctatatatattagtttatttgcaactgatagctaataaatattttgaatataaaaacacatttcattcgaaaaatgttttgaaaaatatttttcgaatcgtgcatcaaaattctgtatttgaatactggattttggccgttattgttgtaccttcattaatattttcgatatatgttttttatagattatcaaaagacaaagggtccaatcaaattataggcaatataaaaaggtttgatgataatatcataagttatctgatgacctatgtaattccattcttgaccgccggcataaatataaattctcaaatggtaacaaacgtcgtattgtttgtcataataatgattatttacgttcgtatggatttggtctatcttaatccgacattgatattaataggttacaatatatacactgataacagtgatggtataaagtatctgacaaaaaattcaccacagcaaattacaactgctcagcagaacaaagagaaattgaaagctacaagaattacagatagtttttactatatatcaaaacgtatttcgaagcgctag

SEQ ID NO: 95727 - DNA, 984 bp, Leuconostoc citreum LBAE C11
atgacagactacgacaaaacagcaattttgaacgatgtgataaatattgaaaaaatgttgagcgaagaagatggaaagaaagtggatgtaagattatacctgttatggaaagataaaaaagaaatgatgtttagttattctgaacttggtatagatataaaaaatacgtttataaaaagatggttacatgattacagtaataatgatcaagttcaagaattttctgaatttaacgtaggaatggaaaaaacagataatttaatgttttgtaagtctgatatttttccgttggtacaaaaatatgttaaaaaaacagacctgacgaatgacccgttacaatttgtgacagatttgactactgtcaggccaattttgaaccgcgttagaggatactgtgcacacatttatactgatgatgacaacgtttatctttttggaagcactacaacgtttaataatttgaccaaaaaaacaagcttgggcatgattggtaatgtaggaaaaaaagaaattactaaaatatctgatgatgatgtaatgattggatttaatcccaaaacaacttgttatatacatgatgacgtctgtgtaataaaaaataaaaaagggtttgaagacctatttggacttctagaagaatacaaaaaaatagctaaggaaactataaaattattttccaaatttcctgacttttatcaaggaatagaaacaatacaaaatgatttagacaaaagacccattctgtataggtcggtagtaaattttggcaaaaacaaaggtataatcggaagggtttcccagcacttagaaaaaatagcagaaattaaaagcagtaacatatttgctgagaaatatcatgatttggaaattaacgataaaggaatagtttataatgaaaaagcgctccccttactattatctttactaaatgaagaaccggttagatcgattattacaggagatgagtttgttgcggaacactaa

SEQ ID NO: 95728 - DNA, 522 bp, Klebsiella oxytoca KCTC 1686
atgaacaaaattgcaaggtttcttttaacagcaagttcgatagctcctgtaggtatcacgctgatatttataggatatatgaaaaacaagccatggcttatttggtggtcgttagggatctgtcttgctagttttatatcagttatttttttcctacactatgcaaataaaaacctcccttctctttataagaatgttgagaccatatctcctgcaaataaagaggttaccaattatttcttgagttatctattccctttattagggacagattcaatcgccgataaatggcaatatgcagtatttttctatatatctcttatcgtttatatatgtttctctgagaactataatttcaaccctcttatctccgctttaggatttaaattttatgaagcagaagacgatactggcgttggatttgtgttgatatccaaagaagttattacaaatttaaaaaacagagattttgaagttattcaacttacagactacacatttatgcatgtaacaaggaaataa

SEQ ID NO: 95729 - DNA, 642 bp, Klebsiella oxytoca KCTC 1686
atgagcctttttgcaatgatgaataaaaactctgctgtgaaagtgtatcgtattgataccgacagacaaacagacatcaaaatcaaaaaaatatttgatgaccaattatctctttttgaaagtcatcacaatacggaacttgttttcgaagccggatatacccctagctataatgaatgtagttatatagataactttgatgaaggaaaaatacttcttgatgcagttcagcgtagcaccgcaatgcctttgtggacaaaaaatgttgggcttaatgatataacagctttttttatggctcctgcgtatcctcaagtgaaagacaaaatagcaatccaaaccttttcaaaaaaacagatacttaacgagtcaagatacttatggctcagtaaaaattcatttacgatgtcagatcttttgggtttcaatctagacgataaattagttgcaatccttgaaggagataaaataaagttcaggaacttcaacaacctgagaagcatatttgatatgagttcttattttgctgaagcaacaaagcaagagatttctgactttgtaaaccaaccagtttttaatataccagtggggtttgatcttccagcccttgcagataacgtcataagaaaaaagtcacattaa

SEQ ID NO: 95730 - DNA, 582 bp, Aggregatibacter actinomycetemcomitans D17P-3; identical to SEQ ID NO: 95710

SEQ ID NO: 95731 - DNA, 942 bp, Aggregatibacter actinomycetemcomitans D17P-3; identical to SEQ ID NO: 95629

SEQ ID NO: 95732 - DNA, 588 bp, Pseudoalteromonas sp. BSi20439; identical to SEQ ID NO: 95724

SEQ ID NO: 95733 - DNA, 615 bp, Pseudoalteromonas sp. BSi20439
gtgcttattctaattggtaatcaagacgttcaacttgccatttataaacatcactacccaataacattattacaaaaagatagtggctttagccttactaaaatgcgaggctcaaataggtttcagaaactagatcaagatattcttaaaattgatcctaagtttcagtttattaaattgaatggtaaatattatatcctcgatataaaagcattagagaggtttttcggtttccatgatgccattaaaaacattgctacacagggtgtagagaatattaaatcatctgatttagtaatggattgtggtgtgtttgaatctcgtcttgatgatataaccttttcaagaaagttagttaaatcggctagccaatcacctgttttatcagtaatacctaaccgtgaaatactatcctttacaaatactcacccagcattaaaaggtaagtttaaatatagtaccgatggctcgcaattcgatttaaaaactaaaaagtctcaaaacttatttcttaaactattaaacgacgattttttacaatctgaattaacgaagaaatactatgagagcgttgcaaaagataatattgaagaagctgctgaaaatgcagcgtaa

SEQ ID NO: 95734 - DNA, 588 bp, Escherichia coli O55:H7 str. RM12579
atgcaaaggaacacatacaacaaagtaggtctatacatcctatctttagctatgctttttgtttttattattatcctgactgccaaaatccccttttgcttcacttcggattgtagcttcataggtttgaagaaacttgtattaacaaatattgttcctattgtttgctttgtattttttctatttagtatttatttttataatagattaaaaaacataacaaaatacaatggacaagatagcgttaaaataacatcatgtcaaagcgaaagctatgaaagtttaacattcttagcaacatacattgtaccttttatggggtttagttttgaagacatgcaaaagaatatagcatatcttttgcttgtagtagtaataggcattatttttattaaaacagacaagtattatgcgaatccaactttagctctgtttggctttaaactatacagggtaaatatactacacccaggaagtggagaaacaaaaaatctgatagctatttcaaatgatgtattaaaagtggacgataatgtttattatagtttctttgacgaatttgtttttatagcaaggaaaaaaatatga

SEQ ID NO: 95735 - DNA, 948 bp, Escherichia coli O55:H7 str. RM12579
atgactactcagcagttaaaagaaaaaatttcaaaaataattgataactttagcggaatcagggttgtatttactactactgctaatgaactaaagctttccagaattgaagggagtgcattaaatagcatagctgaagggtttattgacaaaatcaaagaagacattataaataatgaagatctcacctcacccttgctgtccaattttgatgatagaaaaaatgccttgtttaaatttgattacgaacaatatcctgaagaatttaacaaaatcactcaggccatcgctatccctcctaactcacaagattattataaccctttaaataaattcacagatgtgaaaggaattataattttaataagtggagataacaaatgcctggctctttataaaaacaaaactaaccttgcagtattgagaaatagcagaaaaatgtttaatttagtccctgaccctgatggatacttgaaacaactccctaatgagatattacggttagatttcaattatgatctattttcaattggtgaggatttttacattaaaaatcacaagactcttgaaactcaaatgaaatttcatcaagtgattgaagcccaagcagttattgctttaaattctttacgggattcactactaattgaagacatatcaggtttagaaaagagttcgagagaaatttcattcgctagaaagttggcaaaaatctccaaacattctcctgttttggggaaaatagatactaaaacaattattgattatgtatcccaacataaatatttatctgcaatacttcagattaatgaagcgggagataagttattaattaaaaccaagacatcacagaagcatttcattaaactcatgagcgatgattatttacaatcagatctaaccaaaataatatacatgagcatagcaaaagacagattagatgaatag

SEQ ID NO: 95736 - DNA, 525 bp, Lactobacillus plantarum subsp. plantarum NC8
gtggcttatttttatatcatcttatgtacctgtttttataatgatttttttaaaaaacctaaaaaatttagttcaagtgatatatatagtacatggaaattgaatcctatattttggtttttattgttaataatttctattgtttcaattataatattgttttgctggttgcattttttgaaaaaggagtctcagggtaataaaggtgcttttagtataaaaaagttgaatgcgtatgattctgaagtattaaactattttgttactttcattattcctattctgtctttagatcctaagtcgagtccgtcaatagtaatgaattttttattactacttgttgaaggaatctatttcgttagcaacaatgcattgtattacaatgtcttactaatattgctgggatatcatatatatacttttgatactgataacattgttgtcactcgaaaaaaaagaaatgagttatctttcaatgaatcaaaggcaagtcagattggaactacgaacattttttatatataa

SEQ ID NO: 95737 - DNA, 912 bp, Lactobacillus plantarum subsp. plantarum NC8
atgaatattaaaaatgctctcaacgtggttagttcagataatataaaggttagacttcatttagcacattggagtacaggagggaatattaaagttattacgccaactattgaagatgattttcaaaagcagttaaaatcaatagttgaagatcaactaaataaatgcgacgggttaactcaatcggattataacgttgttggcgctaacgatgatatacttgaaactgccaattttcataaatataagcagcatgttaatactgtgttggacgcgatagatgttccaaatcaaaagtttcgttttgctaatgataactttgatttttttatctatgaattttgttacgatgatgaagataataacgctagaaaagtatttgcctttagaagaacgaaaaaacttaaatcatttaagaaaggatttattggacattttgtagaaggccatttcaaaaaaattatagagaatggtcttcttggtaatgatgggctgattgatctgattgtttacgatgaagagattgcagttttgcagcacattgcgtttgagcgtatttttcgcttgtctaatgaatttaaagaacttgctgaggaagttttgaaaaatgatacgtttaacaaaaaaataataaacttttcgaaattaaaagaagcggcgttaaacaatcgaagttatattaaacgtctatcaaagttggatagtacaaatactgctactttatttctgaaagaccttcaaaaaactaaagtcgttgtggatgaacttaatttagatattgacattgatttggagagtaatcaaatgcagtatcgcgatgaaacacaattgggaaattttattaatttgatgcaggatgcatattacaaaactttgataggtaatacgccaggattagatgagaggcgatag

SEQ ID NO: 95738 - DNA, 594 bp, Klebsiella oxytoca 10-5245
atggatagcaggccatatcttaaaacagtactatatatactatcactgtggcttttatttttatcattattaattatgtcctacgataaggttttgataaaaaatgtgtgggactatattttcacggaaaacattactctctcaatctcgtcattgaaagtgagaaatatcgttttcatagttagtttgattttcatctttattggtgccattattttaatagtccttgcaaatagctttggttcgggttggtctgttgcatgcactgtctcggatatcagcaatgaaaaccatgaacatttagagtttttaaccacttatataatgcccttagttttcactgatgtcgatagtaagagaactgtattaaatttaggattgatgatatttgtaatcggcgcaatatacgtaaagacaaaccggttttattctaacccatcacttgcaatactcggattcagaatatacaaagctaatgtccatgaccgtggagtgaaaaaatgcacagtaatctgccgcagtgttctaaagagcaaagataatataaagtatataaaaatcgacaatgaaacttatttggctaaaatagtgtag

SEQ ID NO: 95739 - DNA, 972 bp, Klebsiella oxytoca 10-5245
atgttcactaacattgaaaatatttcaaaatcgaaacgcatctctggcgaagctttttttgtcgctgatattcaaggtacgatagatatatttaaggttaaccttgaacctaatgctgaaaaagatctgacaacttcattttctaaaagcttaatcaataatattattgaacctaacagaggtaaagtggccgttccacttgtatccactttattagaaagagataaacaagttttcgaatatgatcacttagcaattaatcatctcccaattgaatttactaaaatgaacaacgtgctaaatttcggtgtcaatgggaatgcaacacagtttgattttgcaacacaaagcctgacatcggtaaaagccgtaatttaccacctttgtgatggtaatggaaacagcgtagtcatttaccaacataaatatcctgtttctctacataagaaaacaaaaaagtctttcttgagtctaaatggcagaaccttagataagatcactcatgacagtattgatataaatgacacgattgacttcttcttttttcagaataagtactatgcgctaaacattaaacttcttgaaagaatgtatggattagaaagtgtaatagataatcttgcaaataactcaacgccattaataataaaccttggaattgttaatacacaaggtatgccagtgccactagatattttcaaggacatgtataaagacagagcatttatgcgtagacttgctatggtttcaaaagggaacttagtaaaaacgggagtttcagtccctcaaatacaacaagttatgcaaaaattccctgtatttcaacggaatattgatctaacaggaggattaataaaccttaatactaaagatcaaaagagatactttattcgacttctaaataatgaagcatcttttgcagcacttgataactcgcccttcctggctgttgaaaaagactccgctgcttaa

SEQ ID NO: 95740 - DNA, 270 bp, Escherichia coli DEC1D
atgggattcagttttgatgaccctcagaaaaacattgcgtactttctcttaatagtagttattggtttaattttcattaaaacggataagtattatgcgaatcctactttggcgcttttcggttataagttgtatagagttaacatttctcatgcaggaagtggtgaagtaaaaaacgtcattgcaatctcgatggatgtgctgactgttgacgatcaagtattctatagtttttttgatgactacgttttcatagcaaggaaaaaataa

SEQ ID NO: 95741 - DNA, 960 bp, Escherichia coli DEC1D
atgacccctgtgaattttaaaaatcaaatcaccgaaattttcgataatttctcaggtataagaattatctttatagttaaaactgaagataattatgaattaaaattatctaaaatagatgctgaagctttaccaaaaattgttgaaggattcaaaattaggctttacgacgacattgtgacaaatgaggatttaaccattcctctcctttcgaattttgatgatagaaaaaatgccttgtttgcatttgattatgaagaacatccaaaagagtttgattttataaaaaatgcaatagccataccgcctaactctcaggattattatgatttaaataataaatttactgacgtgaaagggataataattcagttaagaggcaacaataagtgtttgtcattgtataagaacaaaacaaacctcatggtttttgagcaaagccgaaaattgtttaacttgataccagacgcagacgggtatttaaaagaattgccaacccaagtgttccgattagattataattatgacttggctcttatagacgacgaattcctgataaaaaatcaaaaaactttagaaataacgatgcagttccatcaggttattgaagctcaagcaacggtggctttggaagcattgaaagcttcattgcttatcgaagatcttactcaccttgagaagagtgcaaaagaaatttctttctcaaggaagcttgccaaaattgccaaacactcacctgtactggggaaaattgatgtgccagaaattatcgattatgtaagcaagcatacctatctttcaacagttttaattgtaagtgaagacggcacacaattgctcgtaaaaacaaaagaatcccaaaagcattttattaaactacttagtgatgattatttagagtctccgctcacaaaaatactctatgactcattagctaaagatgaactaaaagcacactga

SEQ ID NO: 95742 - DNA, 597 bp, Escherichia coli DEC5E
atgaaaagcaaaggcacatttaataagatagggttgtacatactatctttaatgctgttgtttgtttttattatcatcttaagtgcaaaaattccgatgtgttatggtgactcatgtgaatttataggtttttataaattagccatcgacaatgtaataccaataatatgtttcttctttatttttttagcatgctatttttataagaggtttcgctcattaattaaaatcaacaatgctgacactgttacaataacatcctgccaaagtgagagttatgaaagtttaacttttttagctacgtatatagttccttttatgggtttcagtttcgatgacattcagaaaaatattgcttatcttttgttagtaataatcattggtttaatcttcatcaaaacggataaatattatgcaaaccctacgctagccctttttggatacaaattatatagagttaatgtttcttatacaggaagcgttgaagttaaaaatgttattgcaatatccactgatattttggctgttaacgacaaagtcttttacagttttttagatgattatgttttcatagcaaggaaaaacaatgactcctga

SEQ ID NO: 95743 - DNA, 960 bp, Escherichia coli DEC5E
atgactcctgaaattcttaagcgtgaagtttctgatatcttcgataattttactggcatcagaattattttcgttgtgaagattgaggatagttattctttaaaattatcaaaaattgaagcaggggctctgccgaaaattgttgaaggatttaaaagaaaaattgaagaggatatgatagaaaatgatgatttgaccatacctcttttatcaaattttgatgatagaaagaatgctctatttaaatttgattatgaggaacaacctaaagaatttggatttattaaaagtgctacagccatcccccctaactcgcaggatttttatgatttgaggaataaatttaccgatgttaaagggataataattcaattacgtggaaataataagtgtctatctttgtataaaaacaaaaccaaccttaccgtgtttgaacaaagccgtaaattattcaacttgatacctgattcggatggttacttgaaagagttaccaaatcaagtatttagattggattacaactacgaccttgctctcctggaaaatgattttttaataaaaaaccagaaaactctcgaagttacaatgcaattccaccaagtaattgaagctcaggcgactgtcgctctggaatctttaaggtcgtcatcattaattgatgacctttctcaccttgaaaaaagcgcaaaagaaatctctttctcaagaaaacttgccaaaatctcaaaacattcccctgttttaggaaaaattgatgtcccagtaatcatccattatgttagtcatcatacttacttatctacagtattaattgttagtgaggatggtagaaagctaattatcaagactaaagaatctcaaaaacatttcataaaattattaagtgatgactatcttgagtctcctctaacgaaaattctctacgactcactagctaaagatgaattaaaaacaaattaa

SEQ ID NO: 95744 - DNA, 330 bp, Escherichia coli DEC5E
gtgagtaacgttaaaaatcaaacgcatgaacatcttgaatttttaactacttatgttatgcctcttgtattcactgacgttaatagcaaaagaacagtaatcaacctgctgctgatgatttgttttatcggtgttatttatgtcaggacaaacagattttatgccaacccatcgttggcaatacttggcttcaggttatataaatgtgttattaaaaatgatccttctggtaaggagtacacagtaatatgtagggggaaaatgtctaatgattgtcaagttaaaataaagaaaattgatgatgatactttgatcgcaaaacttatttga

SEQ ID NO: 95745 - DNA, 588 bp, Escherichia coli DEC5E
atgaaaaatgaattagaggccttcgttcaaaataatggtcttacaggtgagatgtttttcatcataaacgataatgacaactatatttatcgacgtgttattttacatgatgaaaatactgaacctctcatcactgaaaatttcaaaaaatctatcactgatgaaattataaagagaatatctattaacgataatggtgatgcaataatagataatatcacggatatgaattatgaacataaaggtgtttactattttgatatcgccagcgaagataaaagcactatcattaaaataattgaagaaatatcgtcgttgacagttgctgacaaccctattgactttaaattcaatgacgtaaatctcgataacattattggtcttgtttatcacatgagtgatggtgataaaaatatttttttgtatcaacatagataccccaattttttacacaaaaaatcaaggctctcatttttaggtgagggggatgtattagttcctataccttacgatatgataaacatatccaaagtaattgattttttgtttttgatggaattagttatgctattaacattaaattattag

SEQ ID NO: 95746 - DNA, 330 bp, Escherichia coli DEC10E; identical to SEQ ID NO: 95744

SEQ ID NO: 95747 - DNA, 1008 bp, Escherichia coli DEC10E
atgaaaaatgaattagaggccttcgttcaaaataatggtcttacaggtgagatgtttttcatcataaacgataatgacaactatatttatcgacgtgttattttacatgatgaaaatactgaacctctcatcactgaaaatttcaaaaaatctatcactgatgaaattataaagagaatatctattaacgataatggtgatgcaataatagataatatcacggatatgaattatgaacataaaggtgtttactattttgatatcgccagcgaagataaaagcactatcattaaaataattgaagaaatatcgtcgttgacagttgctgacaaccctattgactttaaattcaatgacgtaaatctcgataacattattggtcttgtttatcacatgagtgatggtgataaaaatatttttttgtatcaacatagataccccaattttttacacaaaaaatcaaggctctcatttttaggtgagggggatgtattagttcctataccttacgatatgataaacatatccaaagtaattgatttttttgtttttgatggaattagttatgctattaacattaaattattagaagaaagatatggacttactcaagtaattgacaatatggtttctgaagtaactccaaaaatcattgaaatggagattgtcaacaaatctgtcttagccgagccagagaaaatcttcgacgatatgaaagatgatcgtggtttcatgagaaaattagccagagttcttaaaaacggaatattggaactaaatatcgatgttaacattgttaatgagataaagactagtttccccacaataggaaggaatattgatataattaatgatgataatggtatgcaatatataaagctgacaagtaaagcacgcaaaaaagcttttatcagattgttgaatgatgaagccgtacgttcagtcttaacacaaaagccatcgattgcacaaaatcacaaacctgaaaaaaatatcactcccacatga

SEQ ID NO: 95748 - DNA, 519 bp, Escherichia coli DEC11A
atgaacaaattagcacgcttattattaacagcaagctcaattgcacctgtttgcgcaactctattttttattggatatgtaaaagatacggtttggctgatgcaatatagcttatgcgttggcatagcaagttggttattagcaataggcctgattcaatatgctgagaaacaacttgaacctctgacaaaaaatattagttcagtttctcccgctaacaaagaagtaactaattatttcttaagctatttattccctctcctaggaacagactctattgctgaaaataaagcatatgcgttattcttttatttgtcattgttattttacatcagcttttccgagaactataactttaacccagtattgtcacttatcggttataaattttacgaagctgaagatgacaccggcgtaggttttgtattgatttctaaatcagtcattactgatattaaagatatcaaatttacagttattcaattaacagactacacatttctacatgttaaaggataa

SEQ ID NO: 95749 - DNA, 885 bp, Escherichia coli DEC11A
atggcactttttgcagtaatagataatacaattgcaacgagaattgttagagtcgaacttgatgcaacagcaagtacttctgttacggccattttccaacaacagcgtcaatattttgaaagtcatcataacaatatgataccattctatgccggttatacaccaaaacatagtgagtgttttgaaatacaaaactttactgattctgcacgcctgattgacgcagtcaataggcctaccgccgtgcctgtctgggatcccagccaaattgatattggttatattaaagcattatttgttggtgttgacgcgccagcaaaccccaatattattgcgctacaaaccttcaacaaaaaacaaatcttagatacctcaaaatcattctttggaaagctttttgcaagcaaaactacctttagtaaagctaatagcatcggttttaatgttgatgataaactagttgcaataattatcaatgatacaatacgatttaagagtttctttaatctaagaagcatttttgacatgtcgtcctatttttctgctgctactgaccaagaacttaatgcatttagtcaacttagtgtattttctactccccaaggttttgatctaaaatccgttgcagatacagtgataagaaataaagtaacactaataaatcagactgggatgctaacaccccaaaatatgtcaaagtttaaatccgaagctgctaaagtcaatttccccttacaaaccataatagttggcggtgttgagaaaattgtcatgccttcatcaaaaaaagaaataaaagcccttcttgactttcttgaggaagacatttggatttcagggataagtggaagacgctttaaatcgaattcaaagcgcccaatataa

SEQ ID NO: 95750 - DNA, 519 bp, Escherichia coli DEC11B; identical to SEQ ID NO: 95748

SEQ ID NO: 95751 - DNA, 885 bp, Escherichia coli DEC11B; identical to SEQ ID NO: 95749

SEQ ID NO: 95752 - DNA, 330 bp, Escherichia coli DEC14B; identical to SEQ ID NO: 95744

SEQ ID NO: 95753 - DNA, 588 bp, Escherichia coli DEC14B; identical to SEQ ID NO: 95745

SEQ ID NO: 95754 - DNA, 330 bp, Escherichia coli DEC14D; identical to SEQ ID NO: 95744

SEQ ID NO: 95755 - DNA, 1023 bp, Escherichia coli DEC14D
atgaaaaatgaattagaggccttcgttcaaaataatggtcttacaggtgagatgtttttcatcataaacgataatgacaactatatttatcgacgtgttattttacatgatgaaaatactgaacctctcatcactgaaaatttcaaaaaatctatcactgatgaaattataaagagaatatctattaacgataatggtgatgcaataatagataatatcacggatatgaattatgaacataaaggtgtttactattttgatatcgccagcgaagataaaagcactatcattaaaataattgaagaaatatcgtcgttgacagttgctgacaaccctattgactttaaattcaatgacgtaaatctcgataacattattggtcttgtttatcacatgagtgatggtgataaaaatatttttttgtatcaacatagataccccaattttttacacaaaaaatcaaggctctcatttttaggtgagggggatgtattagttcctataccttacgatatgataaacatatccaaagtaattgatttttttgtttttgatggaattagttatgctattaacattaaattattagaagaaagatatggacttactcaagtaattgacaatatggtttctgaagtaactccaaaaatcattgaaatggagattgtcaacaaatctgtcttagccgagccagagaaaatcttcgacgatatgaaagatgatcgtggtttcatgagaaaattagccagagttcttaaaaacggaatattggaactaaatatcgatgttaacattgttaatgagataaagactagtttccccacaataggaaggaatattgatataattaatgatgataatggtatgcaatatataaagctgacaagtaaagcacgcaaaaaagcttttatcagattgttgaatgatgaagccgtacgttcagtcttaacacaaaagccatcgattgcacaaaatcacaaacctgaaaaaatatcactcccacatgatataataaattcgtaa

SEQ ID NO: 95756 - DNA, 603 bp, Clostridium perfringens F262
atgagaaccttagggaaaataataatgtttttatcttcatatgcaccactatatatttttataataactttaaattttaacttaagtgaaataaaaaactcactatataaattatctgatatatcattaattaatcagaatgatgtaattttatatataatgatactattggtaattgtacctaatgtaattttaaaaaagatgttaaatgatactaaagaatatagtgaaacgattaaggttattaatatagaagaggcagatgataagatattagattatattttagcttatatcgttacattcatgacaactaattatgttgattttaaaaatagtgattcaaagataatatttactggattactaatacaggttttgttaggatatttatattgtagagctaatatgttttatataaatccagtgttaaatataatatatggatatcatatatttgtagcaaatacagaaaataagactattataatattaagtaaaaaacaagaaaatgttctagaactgaagaaagaaatttatgaatcaagctataaaagaataaaactgaattgcttttctaatggaatatacatatataaatag

SEQ ID NO: 95757 - DNA, 906 bp, Clostridium perfringens F262
atgtttaacctagatgaagcaagagaatttttacgagaagtagagggctttgatttagattgtatttttatatcaaaagaatatgaactaaagaaagcgctgctacaagaaaatttaaaaaatgaaataattgaaaatctaattaatagatttaataaaattacaaaagaaaagaacgttgttgaatatgatccaatagtaaagttagaagattctatagatagtatttctatagaagatgtaagcaaattaaatttaatagaagaaaatttaaaagctatagaagctattgaagaaatacaaagctttgatgaaatatatgatagtagagcttatgtaatgattttaaaaaaagatgatatgaatttgatgttctttaaaaaatttatttcaagtatatatttaaaaagtaaaatgaaattactgtggcttgaaggtaggatggaaagactagataaggatataatatcaatagatgataaatttgattgtgtaggttttagtaataatttgctagtgatttctaaacctgcttttgaacaaatttttgattataaagatgagtatactaaaaaagctaatgaaaatatagagcatatgaataaacttagtataattaaaaatatagagttattagcaatggaatgcgaaaaagttactataaaaaagaagttagcaaagataaaaaaagatcaaatagaatggtttaaggaccaaatagaaaataattttaatagggttgagcatataatagataaagcaggattagatattcaagttattgaaggtgaattaaacataaatgatgtatctgagttaatccatttaatacagaatgattatcttaaatcagaaattgatgatgagaattatattgcggatagtaaaagaccaatcaagcaataa

SEQ ID NO: 95758 - DNA, 546 bp, Emticicia oligotrophica DSM 17448
atgaaaaaaatacaattatatgttatttctctttggctactattttttttagttgctgtgaaagaatttgtctttatttcatggcaactatcttttacatttgaaggattactaacctttctaaagcccaatattattgcattaattgcaattagtttttcattacttggattattcttttatgcacgatttgaatattttttgaaaggggctactaaactaccaaaaaaaatcacaaaaatagaagaccaaagctatgaacatttgacatttctaactacctacattataccttttttaagagtaaaattggagggcaaagatttagtcgtaaccatactccttcttattataattggtgcaatttttattaaaacaaatctattttataaaaacccaactttggctttattagggtacaaactttataaagtagatacagaaaaaaacaccggactaatttttatttcaaaagaaaatctaaaattaggtgatagtgtccaccatatttttttaagtgataatgtatatttcgtaaaactatga

SEQ ID NO: 95759 - DNA, 963 bp, Emticicia oligotrophica DSM 17448
atgaatcgagaacaactaatagcaagattaaattattttttaaatccagaaaatggtattggagcagcattatattttgtgttgcacgaagacggagagacaattattcgttttgctgatattgaaaataatgtgaagcaagaactcaaagaaaggtttcttgaatatatttctgataagttcataactaatgaagattttgattatcaaaatattagtgaagtggatgaccgaaaaaatgtagtatacaagtatgatttagatgacagacctaatagtcttgatatacttgatgatattttactaaatgaaaaccaacctaacttcaattttaatcaagacagttttataaatctgcaaggttacttaataactattgggaatgagggtaataagatggctctttataaaaagcaccaccctgtaaatttattaaaaagggataggtttttactaattccaagtaatcaaagattagttaagattcaggatgatgctttagctattgataggagttttgattttatgatgcttgacggaaacttaattgtactaaaactaaatatacttgaaaggttttttggttttgaggatgtcatcaggaatcaagctcaaaatacaattgacttaattgaagcaaatcaattacttgaagacattaaacaaatcaatgatattgctcagaccatgtcaaatgcgagaaaattaatgagcattcgtaactctccagttttaaatgtcccagtaattaatgttattaattttattaaaaatcaccctgagttaacaggaaaaatcagttttaatataaatgaaacgaaattaaatcttaatacgggtgtttctaaaaggctatttctaaagttattaaatgatgattacttattctctcaattaaccgagcttcaatatgatagccacgcaaaagataaactcactgaaattgaaaataatgtgaattag

SEQ ID NO: 95760 - DNA, 546 bp, Emticicia oligotrophica DSM 17448
atgaaaaaaatacaattatatgttatttccctttggctactattttttttagttgctgtgaaagaatttgtctttatttcatggcaaccatcttttacatttgaaggattcctaacctttttaaagccaaatattattgcattaactgcaattagtttttcattacttggattattcttttatgcacgatttgaatattttttgaaaggggctactaaattaccaaaaaaaatcacaaaaatagaagaccaaagctatgaacatttgacatttctaactacctacattataccctttttaagagtaaaattggagggcaaagatttagtcgtaaccatactccttcttattataattggtgcaatttttattaaaacaaatctattttataaaaacccaactttggctttattaggttacaaactttataaagtagatacagaaaaaaacaccggactaatttttatttcaaaagaaaatctaaaattaggtgatagtgtccaccatatttttttaagtgataatgtatatttcgtaaaactatga

SEQ ID NO: 95761 - DNA, 960 bp, Emticicia oligotrophica DSM 17448
atgaatagagaacaactaatagcaagattaaattattttttaaatcctgaaaatggtattggagcagcattatattttgtgttgcacgaagacggagagacaattattcgttttgctgatattgaaaataatgcgaagcaagaactcaaagaaaggtttcttgaatatatttctgataagttcataactaatgaagattttcattatcaaaatattagtgaagcggatgaccgaaaaaatgtagtatataagtatgatttagatgacagacctaatagtcttgatatacttgatgatattttactaaatgaaaaccaacctaacttcaattttaatcaagacaattttgtaaatctgcaaggttacttaataactattgggaatgagggtaataagatggctctctataaaaagcaccaccctgtaaatttattaaaaagggataggtttttactaattccaagtaatcaaagattagttaaggtgcaagatgatgctttagctattgatagaagttttgattttatgatgcttgatggaaacttaattgtgctaaagctcaatatacttgaaagattttttgggtttgaagatgtcattaggaatcaggcccaaaatacaattgatttaatagaggctaatcaattaattgaagacataggacaaatcaatgaaattgctcaaagtatcacaaatgcgagaaaattaatgagaattcgtaattctccagttttaaatgtttcagtaattaatgttattaattttattagaaatcatccagaattaacaggaaaaattagttttaatttaaatgaaacgaaattaaatcttgatacgggtgtttctaaaaggctatttctaaagttattaaatgatgattacttattctctcaattaactgaacttcaatatgatagtcacgcaaaagacaaacttactgaaatggaaaacaatgactaa

SEQ ID NO: 95762 - DNA, 636 bp, Escherichia coli 541-15
atgacatctactaattctaacagtgcatcatgcgacaatataaagttcaaatattatctttattttttatctttgtgggttttatttctatctgtttcaataatgtcctttgattgggtttttattgaaagattggttagatttattttattgaagtatacatttgaggatgtatttaacaactttaacaagttaaaagtcaggaactttgttttcattttctgtatttcgatggttttttcgggtatttcatctgtagtatatttattttcatcgttatcaagaggttggggaagcactcataaagtgagtaacgttaaaaatcaaacgcatgaacatcttgaatttttaactacttatgttatgcctcttgtattcactgacgttaatagcaaaagaacagtaatcaacctgctgctgatgatttgttttatcggtgttatttatgtcaggacaaacagattttatgccaacccatcgttggcaatacttggcttcaggttatataaatgtgttattaaaaatgatccttctggtaaggagtacacagtaatatgtagggggaaaatgtctaatgattgtcaagttaaaataaagaaaattgatgatgatactttgatcgcaaaacttatttga

SEQ ID NO: 95763 - DNA, 1008 bp, Escherichia coli 541-15
atgaaaaatgaattagaggccttcgttcaaaataatggtcttacaggtgagatgtttttcatcataaacgataatgacaactatatttatcgacgtgttattttacatgatgaaaatactgaacctctcatcactgaaaatttcaaaaaatctatcactgatgaaattataaagagaatatctattaacgataatggtgatgcaataatagataatatcacggatatgaattatgaacataaaggtgtttactattttgatatcgccagcgaagataaaagcactatcattaaaataattgaagaaatatcgtcgttgacagttgctgacaaccctattgactttaaattcaatgacgtaaatctcgataacattattggtcttgtttatcacatgagtgatggtgataaaaatatttttttgtatcaacatagataccccaattttttacacaaaaaatcaaggctctcatttttaggtgagggggatgtattagttcctataccttacgatatgataaacatatccaaagtaattgatttttttgtttttgatggaattagttatgctattaacattaaattattagaagaaagatatggacttactcaagtaattgacaatatggtttctgaagtaactccaaaaatcattgaaatggagattgtcaataaatctgtcttagccgagccagagaaaatcttcgacgatatgaaagatgatcgcggttttatgagaaaattagccagagttcttaaaaacggaatattggaactaaatatcgatgttaacattgttaatgagataaagactagtttccccacaataggaaggaatattgatataattaatgatgataatggtatacaatatataaagctgacaagtaaagcacgcaaaaaagcttttatcagattgttgaatgatgaagccgtacgttcagtcttaacacaaaagccatcgattgcacaaaatcacaaacctgaaaaaaatatcactcccacatga

SEQ ID NO: 95764 - DNA, 543 bp, Shigella flexneri 1235-66
atgatcctgctcattcaggattttgatgacagtaaatataaaaggcatctttgctttgatttactgacatctgactcctgtaacttgccgtttaaggaaccattactgtccgtcagtttatttctcatctgcctggtatgttttcttctttcatggcttatattaaaactggctaaaagcgatgagcaaaaaatcaggattctggaagtaaagtatacgccgtcagacctgatgaactatgttctcccttacattgtttcgttcatgagcattaattaccaggagaccaacaaattttttgggtttattgtatttcttctctggctcttctggctgtcttataagaccggacaaataatactcaaccctatacttatcgtattcaactggaaaatgtatgaagtaacttatcgacatccaggtagcaaaaacacacactcaggtgtggtattatcaaacctgagtatttcccctgattctgattacgaatatcagacaatacagtctgtcattattattagtggagataaggatgaaacttaa

SEQ ID NO: 95765 - DNA, 456 bp, Shigella flexneri 1235-66
atgaaacttaaagaattacaggattttgatatccagagtgcaacactttctgtctgggtgttcaggaaacagacagtaaaaagtaacccggtatacagggggaaatggatcactgttgttcctgaactcaaaactgaactgacggaatttatttgtgctgaaagaggaaaatacacggagactattgagtattcactgctggcccagaacaatgaagccagcctgatgctgattggttccggagaaacctctgcggttgcaattacagcactatctgcggaccagacacaggccagaaaagtaaaagaaatcaaagaactggcgaactgtgatttttactctgtgaaactggtgtccggagatactgtactacattgtgtcaaaaaaacagatccatcatgggcaacgaaaaacaatccggattacgatctgttgttttcaaaaacaataaattaa

SEQ ID NO: 95766 - DNA, 591 bp, Bacteroides salyersiae CL02T12C01
atggtaagttttgtttctaaatttctgttcaccgccacggtaacagcaccaacattcttgtcactaggattaataggtgtcattaaggatagcacgaattattttcgattttgggatgaaatgctagaaaataggatatttcctactagttttgaatggtggggcatcaatatcagttttggattcacattaatatgtcttatcggcatcaaaatttttctttgtaaaaaatctagcaagtacaaggagggaaaaactattcaagtgaaatcttattcaaatttatctctgaacagtgcggagcaggtaatttcgtctataatcccttggttgacaatatttgccgacgaacttgattttatggtattatttgtttgcataatacttcaatgctgctttattgcgattgcaagttataataacaacaactataatttactttgttcaatatgggggtatcgctattatgaagtatatacagaagaaaacacctatatactaatttctgaaaaatgtatcaggaataagaatgagattaaaaagtttgttgaagtgacagattatatgggtttaatcattaatgaaaaataa

SEQ ID NO: 95767 - DNA, 852 bp, Bacteroides salyersiae CL02T12C01
atgagccaattttatgcattgatgcctgataatacagtaaaacatatccctctaaaagaagagataataacagagattaaaaacctatttataaatagtggggctacattcaaaccagaaggtatagaagaagatgttttcgatggcaatattgttagtcggaacggagaaaatataacgtacgtgcattatgacttacctgaagattttgctcgtataccatgtaatcaggctgacatgtccgaatacaatataaatgaagatatgcctaaaagcatcttttattacgatgatggaaagttctattttcagatctttaataagaaaaatatgttgcaacgcaaaatggtcttgcggtttgaatatggaaatgtatttgcaaaaatgaataactctgcttttattgtcgaagataagattcatgcgttgtacgaggaaggaaagctatatttccaaagttatacagtcgcaaatcaaatattctcactaataaattttgttacagaagctacaaatgctgaaattgaatcctttggagaattagatggaattaatgtaaataccgaaagcataaagcatatagcaaacataaagacacgtcggcttataaagttgttgtcgaacactgacaatatttcaacttttatgagaaaagcatctcgaacaaaaacaagcctattaaataaatacggagttaatgcccaaataaatgaaaataaagaattggttttaccaacaaataatgttgcagatttgaaccgtgttttagagtttctcaatgaggacatatttaggggtgtaattaccgacagactttatcgttcaaattcaaagaaaaaagataatcactaa

SEQ ID NO: 95768 - DNA, 561 bp, Staphylococcus epidermidis NIHLM018
atgaagctgttaaataaaatattattgtttatatcttcatttatcccattatatataatgttaattattaaagaaataggaagactaactggtagtaaaaatttttgtaaagacaacataacaatttgcgtttattggactgtattatttttattacttatagtttcaatctttggaatattaaaaattatagtttgtgacaaaggtaatagaacaaaatcaattgaagtaaacctagaaaaacagggtgataatgttattagttatataatgacctatatagtaccattattatctattaatcctaatgatataactaatttaattcaaaatatttttcttttcataataataggtataatttatgtacaacaaaatctattgtttttaaatccaatattttcactattgaaatataaattttataagaatgaaaataatgaaattattttaagtaaattaaatattgaagaattaaaattgcaaaaaaaagaagggagaaaagtatttattcgtcagatagatgaaaaattttatattattaaaggtataagaaaataa

SEQ ID NO: 95769 - DNA, 951 bp, Staphylococcus epidermidis NIHLM018
atggatttagaatctatttttaataatctaaagaaaatgaatgaagatgaaattaaaaaatcggttacattttctttaataaagaaagcagaaaatgataaagaaaaaaatttattttatgaatttgatatagaaggagatgtacaattagatttatttgacttagtaagaaaatattttaacgataagagaattagagatagagcaacacaaaaatatgatgccgttattcaacgaagaggcgacaaaggattttatttaattaaaaaagatgattatacacaggtaagtaatttttttgaggcaattaaaaatgatactagaataaaaacttctaaggattttgatatagatgactttatagcatatgtagtaactattgaatattcttcaaataaatatgtatattatattggagaaatttcagcattaacctctctaaataaaactaagtttataggtaatataacggataaaaaattaaaaaaaattagtgagaaaaatttagtagggtttaatcaaacaatggctatgtttattcatgataatgaaatgttgattaatcaaattagaatatttgaaaagttgtgtaatatgcatactgagtttaaaaagatagccgatgaactattggaaactatttcaagttacaaagttatagataattttgaagagtttaagaatgaagttgaaattgacgataagttttcaagaaggttagcaaaattaagcgaaacacctgatagagtaattgcttttttaaaaaatatagaaaatgcaaaagatgtattagatagtccagactttaaagataaatttaaaggtattattttaaaagaaaataaattggtatatgataaaacaatgactcaacaatttattactttaattagcgattcagcttatgagtcgatagtaggtaaacaaaaaagactagacgaaacattttag

SEQ ID NO: 95770 - DNA, 528 bp, Staphylococcus epidermidis NIHLM020
atgaagctgttaaataaaatattattgtttatatcttcatttatcccattatatataatgttaattattaaagaaataggaagactaactggtagtaaaaatttttgtaaagacaacataacaatttgcgtttattggactgtattatttttattacttatagtttcaatctttggaatattaaaaattatagtttgtgacaaaggtaatagaacaaaatcaattgaagtaaacctagaaaaacagggtgataatgttattagttatataatgacctatatagtaccattattatctattaatcctaatgatataactaatttaattcaaaatatttttcttttcataataataggtataatttatgtacaacaaaatctattgtttttaaatccaatattttcactattgaaatataaattttataagaatgaaaataatgaaattattttaagtaaattaaatattgaagaattaaaattgcaaaaaaaaagaagggagaaaagtatttattcgtcagatagatga

SEQ ID NO: 95771 - DNA, 426 bp, Staphylococcus epidermidis NIHLM020
atggctatgtttattcatgataatgaaatgttgattaatcaaattagaatatttgaaaagttgtgtaatatgcatactgagtttaaaaagatagccgatgaactattggaaactatttcaagttacaaagttatagataattttgaagagtttaagaatgaagttgaaattgacgataagttttcaagaaggttagcaaaattaagcgaaacacctgatagagtaattgcttttttaaaaaatatagaaaatgcaaaagatgtattagatagtccagactttaaagataaatttaaaggtattattttaaaagaaaataaattggtatatgataaaacaatgactcaacaatttattactttaattagcgattcagcttatgagtcgatagtaggtaaacaaaaaagactagacgaaacattttag

SEQ ID NO: 95772 - DNA, 507 bp, Nocardia cyriacigeorgica GUH-2
atgcagatcgccgcgcgtaccccgctgttcttctccagctacaccccgctgttcgcgatcctcgccgcccgcttcgccgccaccccgtggctggccttcggtgcgctcgcgctcatggcgctcggtgcgggctgcacggtgtgggtgctgtatctgctcggctcgtcggcacgctcgtcactcaccgtggcgcgggtacacgagacgggcagcgaatcgggcggctacctggtgtcctatgtgctgccgttcctcaccgtcgaaaccccgggcgtgctcgacgcgctcggctacggcctgttcctgctggtcctgctgatcgtctacgtgcgcaccgacctcatccaggtcaacccgatgatctatctgctgctgcgccgaatcgtgaaggtgcagaccggcaccggcgatatggcctatgtcgtggtgcgatcggtgccccggcccggcgacaccgtcacggtggcccagcacgcgggaatccgagtcatgacggagcgccgatga

SEQ ID NO: 95773 - DNA, 990 bp, Nocardia cyriacigeorgica GUH-2
atgagcacgcgcgacggccgggcctgggccgatatcgatatcggcggcgaacccatcgacctgctgctgggctggcgcgacgggcgcaaacacctgcaagcgttgcggatcgaattcgccgccgccctcggggcggaattgcgtggcatcgccgcggcgacgttggaccggctcgcgggcatggcgccgatcgaatacgacaccaccgcaacgctcgtcgacggcgaggagttcttctccttctccctcgacggtttcgacgggcagcagccgggcgccgagcccggcgaacccgacgcccagatcgccgggctactacggctcatcgcccgctcggcgatgctggacaccgtgctaccccggcagatgcgcgacggcaccttcctgttctacgtcctgatctgcgaatccagcggccccgaccggcaccggaccgcgttcgtgcgattgcagcacgggctgcgggtggcctccgcgcaccgcatccttgccaccttcggcgaacggctgaaccgcgtgggcgacccggtattcgccttcgccgaggaattcgatctcgtcatcaccgccgacgagatcgccatcctcaaacccgacaccttcctgcgcctgttcaccgacctcgaactgctcaccaaggccacacccgatttcgtcgaccacatcagcgaggcgctcggcctggacctggcccaaccggtcaaggacaccatcatcgcggtctgcgccaagcggcccagctacgccaagctgctcaaacggctcagcggtgtcgactacctgccgaaggtcacgctgacgtcgctgcaagccgagatcgagcgctatccggaactacccgaggggattcagatcggcgagtcgggaatcgtgttgagcgatcaaggtgtgccgacgttcctggagatcctggatcagcgcatctggcgtgggccgttcgatgattcgtcgcgggtggcgacggcgtaccggcggttgcggccgcggtga

SEQ ID NO: 95774 - DNA, 624 bp, Bacillus cereus HuA2-4
atggttaatcctttatggttccggatgtcgctagtaatgtcagcgtattttcctttgtttttagttttactgatcaagttttgtaactttgaattcttttattatgtaatgaaatattggaaatttgcaggcattctcttcgagctggaaataggaagttcaaagggaatattgagtttcatgtctataataatgtttttgatttctttgatgtgttgtatttatgtcatatatgaaattaagaatactcaaaggaacagagttggccaaattaatatacgcttaaaggaaatacaatctagagataaagatgttttggtatatttgatgacgtatgttttgccgctggttagtttaaatacccagagcacaaaagaaattgtgattttttgtatcttgattgcgatgattatgtggttatctttaaattctgatttgttgtatataaatcctttgattactttatttggaatgaaattgtatgcagtcgaatgtgaattaggaaatgtaattatcattagtcatgaaaaaaatttagaaagaaaaattgatgagagtttaacatgctatcgactagtagagaacaaaattttgctaagtggcttaaataggagtggaacatag

SEQ ID NO: 95775 - DNA, 960 bp, Bacillus cereus HuA2-4
atgcaattaaatcttgaaacttttaaggaacaattttgccaaatccgagatactgaccaaaatgcttttagactttttattgtaggtacccaactaagagaaggtacggcctctgtttatgatgagtgtaatccagcggaattagttgttgaaggtgaggtacaggattggttactaaacgtgacccaaccattcttgtcgaacttgctagaatatgagttggttaatatgtcggaggcagatgatgaaggaagtacactaaaaaggttcataagtttagaaaatttaaatcagctaaatgaatgggctaacactattactaggggacacggtgtgagcaacgcaagtgagcttattaatcgtgaaggttttaagccaaaagcattaattgctaagtttcaaattggtgaaacacctatatattttttgaaggtattaaatgaaggtgtgcttttgaaaagaaagacgattcttacttatgatgtgggaagaggccgatatattatagaggatggcagaaataaaaaactctatcttgatgagcaatgggacggtattatttttgaaaataatgtagtcttgtatcatgaaaataaaatcttatcattatttaagtattatgaaaagttccgagaagctgctgaaagggttgttgagcaaataggagacttagatattttatctgatggtacagatctagggcaatttattgaatcgcaagtcatgctacaaaagaagttggcccgtgcagctgattatgaattcgagacaataagtagggaacgtattgtagaattgattcaagaaggtacaattcagttgaacttaaatgatgaggggaaaattgagtgtacaactaaggaagaggcccgtattgtggtggatgtcatattggataattttgtgacatcattgattacagaaaataaatatcgagcacgaaataaatcaaagatataa

SEQ ID NO: 95776 - DNA, 588 bp, Aeromonas hydrophila SSU
atggcgcttgatgaaatattgaaaaaatttgagctatatatattatcgttatggttactattttttctcatgattgttgttactgtagatattcctatatgtttcggagaaaactgttattttattggattcagttcatttttttcaaaaaatataataccactaatctcattgatctttttatttattggctttttttcgtacttaagatttgactataggatttctggtagtaagaaaataccttcaagaatagataaaatagaagatctcaattatgagcatttaacatttctcacaacatatataatcccattgatatgttttaatttatccagtgttagatatgcatttgctttggcatttttactatttgtaattggaattatatacattaaaacagataagttctacgcaaacccaaccttagctgtccttggctaccggttatataaaataactatgacatcccgaaatgaagtaagggagaacattgtaataattactaaagaaagactaactaaaaatgatcagataagaatcatgaatctcgatgacaatgtctgctttgcaaggaaggttatatga

SEQ ID NO: 95777 - DNA, 990 bp, Aeromonas hydrophila SSU
atgacgacaatagaaaatcttaaacgtggcgtttcctcaaccataagttccaatgggtgttcagccgaatttttcttcttgtttgatgataaaaatggcatgagagttaagtctgtcgacataaatgaatctgatcatgacgagctggagaagatttttataaaatcagttactgataccttactcttgaatgatgatttaaccctcatttcactctccagtgcggatgaccgtaggaatgcaatttaccattacgacttagatgacgtaccgatcagccttacttatttaaaagaaataattaacaatgataaaatagatagttttaaactctctgatgatgacctgtcaactcttgaaggaatattgattcttattggcaatcaagactcacagcttgctctatataaacatcaataccctgtaacgctaatgaagcctgactgtggtttcagcctaatgaaaccaaagggaaataatagattcaaaaaattagacactgatatactaaagatcagttctaagtttgagtttattcaatatgacaacgagtactatatatttgatattagagcactggaaagattctttggttttcatgatgcagtaaaaaacattgcagtaaaaggtgttgaaaacataaaaaacactaatatcgtaatggattgcaatgtgtttaacgctcgattagatgatatatcatttgctagaaaactagttaaatcagctaataattctcctgttttaaatgtaataccaaactcacagataattaatttcacccaaagtcatccagcattgaaaggaaggttcaagtacagtaaagatggacttcaaattaatttaaaaacaaaaaagtcacaagatctttttctgaaattactaaatgatgacttccttcaatctgagttaacaaaaaaatattacgacagcattgcaaaagatagcgttgacattaatgaggaccgtgttgaattagctgtaacataa

SEQ ID NO: 95778 - DNA, 576 bp, Kineosphaera limosa NBRC 100340
atgcgggcgcttgtggcggtgggactgctggcgtcggcgttcgcgccgctggtggcggtgctggccgtgctgcagctaccggcgctgggttggtgggcgtgggcgttgctggcggggtgcctggcgtcggtcgtgttgctgctggcggtgctgcggtcgctgggcggcatccaggccaggccgctgcacgccaggcaggtgcgccgggccgacgagcgggtcgtcgcgttcacctcctcgtatgtgctgccgctcgtcgtggccgccttcgggcccgagacaccagccaaggtggtcgccaccgtcgccttggtcgccctcatggccctcatctacgtgcgggccgggctgttccacctcaacccgaccctcgcgctcctgggctaccggctgtatgaggtcaccgccaccaacggcaccgtgacgatgctgctcaccacgagccggcatctgcgccaagacgccaccctgcactgccgctacctcggcgacgacgtggcgatcgagggtcgcgtcgatggtcggcggtccggccgcgcgccggccgccgagtcgaccgacggggaggcgacatga

SEQ ID NO: 95779 - DNA, 966 bp, Kineosphaera limosa NBRC 100340
atgaccctggaaccggcccggcaagccctagaggccgccgcggcggcccagagtgcctcgctggagaactttgtgctgcgcgggcggacgctcgccgacgccacggcctggcggatcgacctcgagcaggatctcgcccagcaggtcggtgatgacgtgcgcggtggcgccggcgcgctggccgacaagcagttgctgccgtacgacccggcgtaccagacgaactcctcgcaggtgctcgtcgaggagctggcgggggtgcccgaactggcggcggtcgatgcgcgcctgcgcgggggtgatctgccgcccgatccggtcggcgatggccccgagagcgatcccgtgctggcgatggtccacgtcgtcggcgacggcgcaactcggctcgccgcgtatcgcttcaaggggcccgggatcgccgtgcggcagcgcggcatcgcgctgctaccgagggcaggggtgtatcggcgagtccgtgacgacctgctgttctacgacgaccgcttcgacgcgtacacgctcggggagtccgtctacttcacgaccgtctcgctcatccagaccaaacttgccgccgacgacaaggcccgccggctcgcccggcagaccctgcgggaagtgacccgcgacgtgcgcatcgacggctacgagctgctcgcccaggccgtcgccgacgaccccaccctgcgcgccaagatggcctccgtcgcccgcatggtgcgcgacgatccggagtacgccgcgaagctcacgacccaggcgctcgtcgacttcgtgcaggcccacccgcagtacgacattcccgtcgccacggtcgacggtcgcgaggtgctgcgcttcgatccggctccgcggcaccggcaccagatcccgcggctgctggccgacgactacttgcacagcctcctcaccgaccgcagctacgaggccggctccaagagccgcgtccggttcaagggatga

SEQ ID NO: 95780 - DNA, 597 bp, Alteromonas macleodii str. 'English Channel 673'
atggatctttcaaacacattagataaaatcggactgtacgtactttcactgttggttttatttgtatttattatatttttgacggttgatgttccgttgtgtttaggtgaacgctgcgattttgttggctttagtgcactagcggatattacatggaaaaacttttccagcatcttatcgcttttcggcttagtagcaggtgtttatttctattttcgttttgagaatgaagtcaaaggtagctctttggacgtcatgacgattgagaagtccagtagcgaaagctatgaacacttggtgtttctagcaacctatatcctaccattcattggatttacttttgatgagccaaggaaaacgattgcttacttcttacttttggcggttattggattaattttcatcaaaaccgacaaatattatgccaacccaacgttggctttactgggttacaagctgtttaaagctgaagtgcgttgtaggggcactcagtataaaaatatggtcattatctcaaagagtgaattgagtgaaggtgatcaagtaaatttcaagttcttatccaatagtgtttgttttgcaaggaaggtcgaatga

SEQ ID NO: 95781 - DNA, 954 bp, Alteromonas macleodii str. 'English Channel 673'
atgactgttgaacagttcaaaaacaaggtaagtgcaattgttgatgattgcgtgggtatcaaaatgttttttgtggttggtgaagcaaacattaaagactcggatgtcgataatgatgctctggtgcgtttgaagacaagcatggtcgctaggctgaagactggaattgtggaaaatgaatctttgtcaatcccgcttttatcggacgcggatgaaaggaaaaatgcactctataggtttgactttgacgacaagccacttgaatttgacctgttagagcaagccttacaattaagagttaatgcgccggataagtaccaagtcggggacggaaactttgatgacatcagcgcaataatcgttgtgctgactggacgaaacaacgaaaccatcactctatacaagcatcagtacacagtgtcagtactcaaagctgaacaaggtgcattgaatctattcaaatcaaataatagattgtctgaacttgactcaaacatcctgaagatagatcccaattacgtatttcttaagcttgataacgattattacgttgaaaatgttaaaactctagaatcatatcttgggttccacgatgtaattaaagacacagcagccaaatgcgtagcaaaacttacagatatggctttgattgaagataccgctccgctagtcgaaagggttgagggtgaggatatggcattctctcgtaaactagctaaggtagctcgcaactcgccagtaatgggagccgtagcaaacaacgacatcatcgtattcgcacagaaacacgaatatttgtcaaaattgttaaaactaaatgatgcaggcgataagtttgtattaaaaaccaaaaagtctcaggaccatttcattaagctagtgagtgatgattacttggaatcagaattgacaaaaatccaatatgatagcttggcaaaggacaaactaagctag

SEQ ID NO: 95782 - DNA, 516 bp, Methylocystis sp. SC2
atgttgagcggtattgcacgcctaatgctgacagcatcctcgatggctcccatcgggttcacatatgcttgggttgcgttcacacaaaatgaaaaggtcgttgcggtaatagctgcgtcatttagcgtgatagcggtcatttcgtgtgtgttcacgatctcatatgcgaagaagtttctagaacgcatgaactttaaggccgcagcagtcgaagcggctgacaaagaaaatatcgggttcatgcttttatatttgcttccgctctttacagataaaattaacacgctgaattggcagctatggatccccgtaattggaatattttctgttataaccgcgacggggtattcgtatcacttcaacccattgcttggcctgatggggtggcacttttataaggttgaatcaacagacggtgtaacctttgttctcataacgaagaaacacctaagaactgcggctaataaactggttgttggccaacttacggagtatatcctcctggatatggagtga

SEQ ID NO: 95783 - DNA, 873 bp, Methylocystis sp. SC2
atgacaaacctatttgcattttgcagacaggcgaatcagccggttatcaaacgcgtgagcgttactggcccggtacaggcaaaaattggcggcatctttcaagggcaggaggctgcatttcttgaaggggtttccgaagaggtggattttggtggagactggaaaccggatgacgacgagatacttgtgattgacgcaccagacgaggcgcagcttttggctgccgcagtctctggaaatgcgatgtcgtatccagcaattgatgccaataattttctcagcgaggcgataaaagctctgtttatttccgtagaagatggggcgaaccatagaattctaattcagaaattttcagcccagcaaatattaaataacactaaattctgccttatgcttgacggtaatacatttaaggaattgactgaaaaagcattctcgctagacaatcatataactgctataattgatggtaataggctaaaattcaaaagcttctttatggtgaagcgtatttttcaattaaacaatttatatattgcggcgacagatgatgagcttgatacattttgtactcatgatagtcttcaagtgacgagcgcggatgcgtttaaagcgcttgccgatgaaaatgtcaggaaaatggtgcatgctataacacgtacaaacgttctgcataactgttctgttgatgagatttccgaaaaggccacggctctaggtttagatataagcgttgaaggtggaaaaatagtaatcccgagcgagaagaagcgcatcaaggagcttttgcgatttctagacgacggaattttcgaagcgccgcttacatcgagaaaatatatcgctaattccaagaggccgtttggcgtgtaa

SEQ ID NO: 95784 - DNA, 546 bp, Amphibacillus xylanus NBRC 15112
atgactggtttttttagagtaatgcttttcatttcttcgtattctccattgtaccttttaattatagttaacatatttcctttttgggagataagagatttaacttggcctttaccaataatggagattattgtgtgtggtgttttattatttttatttgttatttcattttcacctataatttatattagcaaatgtgaactcaacgaaacaatagaaagtaaaaaggttagaaaaaagcatgaagaaactctaagttatttagtaacttatattgttcctttattagtaattgatataactgaagttaatacattaataactaatatgttgttatttcttttaattggattcttatatgtaaaatccaatatgattcacattaatgtattgttcttgttatttggatggaatatttatgaagattcaaaaggtcgaattataataactatggaagaagcagattattttttaagacaggaaaagatcggggttaaattgatggtcagaaatttaggtggtggtatttatttgcatagaaaataa

SEQ ID NO: 95785 - DNA, 924 bp, Amphibacillus xylanus NBRC 15112
atgaatattggaaaaattgaagatggaattactaaaattctagttagcaatagttccaaagtaagtctatttataattgaaaaattagacacaaaagatggattggattacataagtcataaaccatctttagatttggaattacagaaggagattataaaagtaataaaaccgacgctttccaaaattaaaaatacagagcaaatagaatttaatgagaatggtcgacctaatggagtagtcgaatggtgtaagaaggattatgttggtgtgtctttagaaaggctactaaatagtcttaaagaagatatgcgtaaggaaaaattaatagacagtgataaaaaggatatatactgcataagaatagaaatagacagtggagaatatgtatattttttaaataggattccccaattaaggaaatttgaaaaaggcatttgggggagattagttgattctacatttaaaaaaactacaaatgcatttataggaattgaacctaattttgatttaataatctatcaagaagagatattagtagtcaacaacgtagctatgcaaagaatctttgatttaagaaccaagtatattgaaaatgcaaactcggttcttagttcctttgaagattcggaaaagatagagggatttgaacaatttaaaatggatagtatagaagacggaaatgttgtgaagagagtatctaggttaatggaaaaaccggaaagaatgacaaggtttattgataattttgataaggttgagcaaattattatcgagtttgatttaaatattgagctaaatgctgaaaagacgaaaataaagtatactgataaaaaacagttgaatgatattgtaaaacttcttaacgatgcttattataaaacggtgttatcaggtgaaaaaggtgtagatgagttaaggtaa

SEQ ID NO: 95786 - DNA, 531 bp, Gluconobacter oxydans H24
atgtttggaaggctcgccaaatttttgctgattgcgtcggccttagcgcccgtagggctcgtttacgcgtggatcgtctggcgtaaccagcaacacggcattgcgattggtattgtcgccgcatgcgcgatgctggtgttgatctgcgtgtacctgcttcggcaggcccgtacctctttggaacgtttcccgctcaatattaccagtgttgagccagctgatcgcgagaatatcgcgttcatgcttctctatctctctccgctatttacttccgaacttgggcagatcaacatcaatctgctcataccaacactgttgatattcacactcttgacggcaacaggatataactatcatttcaacccactactcggcctagctggctggcatttttacaaagtcgagtctgcagaaggcgtgacctacgtcctcataacacgtaagcagctcaggaatacgagcacaatcaatcacgtcggccagttaaccgaatacattttgatcgatctagagggtgcgaatgcttgttaa

SEQ ID NO: 95787 - DNA, 837 bp, Gluconobacter oxydans H24
ttgatcgtgaagcgcatcaaaataactgctgcggttcagaatcagctagaaggaatttttatccagcaggagcagatgtttgttggtggtgtaactgaggaagtaccgtttgatggtggatggagtcccgacccacacgagcatcttgtggcccaagtgacggacgaagcagcggtcatttttgcagctgctcaaggtaacatcgtggcaatgccggaagtcgatccagcgaactttgaggctgagaacatcagagcgctgggtgtcctagtgcaacgtccaactggaccacgcctgctgctacaagagttttctgcccgccagatgcttgagcgtcggtttagtctaatacttgatggcaacaccttcaatcgactgactcagcccgcatttgcgattggtgcctctctagcgggcttcgtagaaggcgacaaaatcaagttccagaaattcagccgtatcaagctgattttcaacctaaccagcctttatcaggaagcgactgatactgaggttgaaggcttctgtgggcttgaatgcatcaatgtcggcgacatcggaaaattcaaaaacctcgctgatcaaaagatgcggaagctgatcaatgcgatcaccaagcgaggtacgctaaatgattttacacctgcacagattcaggtcgcagcggccgatgagaactttcaaattgcggtcgcagacgggaagatcatcattccgtcaatgaaagcagaagcgaaggcgctccttcatttccttgacaatggcttatatcgtggcccgcttggaggagaaatttttattaccaattcaaagcgggcgcttacacccatgccctag

SEQ ID NO: 95788 - DNA, 591 bp, Alcaligenes sp. HPC1271
atggaaagccaggaaagacagctacagtttcaccaagcagtaatgaagtttgagctttacataatatcgctctggcttctttttgtgctgatgatcatagtcaaggtggatattccaacttgttttggtgcagattgccattatgtgggaactctgcagcttgctcgaaccaatgtgttacctataatttcgttgattttcattgggcttgtgattctttgttattcccgattcaaatacagaactcaggggaatgtagggcttccgaccatagcaaaaaaagtggaagacctaagctatgagcacctcacttttcttacgacctatatcgttccactgatttgctttaatttggataatattagatacatcgtcgctttgttcgttctgttatttgtcattggtcaaatttacgtcaagacagataagttttacgcgaatccaactttggcaatactcgggttcagattgtacaaacttgaggttgacggggtcagtaaagtaatgatcacaactcagcgtatcagcgagttagacaagatagtatttacgacaatagacgaaaaattcgtatctggaaggaaagcatga

SEQ ID NO: 95789 - DNA, 972 bp, Alcaligenes sp. HPC1271
atgagcatagatgcgttgcgtcagaccgcacaaaatctggcaaatgatccacaaacagtaggcatcatgttcttcactttgaaggagaataatacgtttgttcctcgaagagttgagctgtcgagcgacgctcagctagctctgactgcacaactgaaattagagattcttgaattctttaagacaaattatgccttgcgagatctcacagcgattgacctacgccaggatgcagtttttcgctataacctcccaagctatccatctcagctagaggtactaaaaaggacgcttgataaacctgccaccattaacgattttaatcatgtaaatgactcagtcacagaattaaaagctatagtggccgtattgggtaatgggaacgaaagccttgcaatctacaagcatcactaccccacaaacacttaccgcaggaatggtttcaatctgttgcgtgcgggtatagctcagaatcgctttgagaagcttgaccaagacatcattcgaatgggacataccatcgattttatttatgacggagtcgatgtattcgtcacgaatttcaaaattcttgaaaaattcttcggttttaaggaagcagtgaaggccgacgccactataaaattagccacactcaccgctcgtaatatagttcaggacgctgcaattcttaaggacaggataactgtccaagaagacttgacattcgctcgcaaagtcatcagagcgatctcgcattctcgggtgcttgacactgttactaacggtcaaatcattcagttcatcaaacagcatcagagcttaagtaagaaaatcaaggtcaatgctgctgatactcatattattctggatacaaaggtttcccaaaatttcttcatgaaactactcaatgatgattatttaaaatctgaactgacaaaatttgaatatgacgcagatagcaaggatttagtggaagcgacaggcctgtaa

SEQ ID NO: 95790 - DNA, 531 bp, Paenibacillus popilliae ATCC 14706
atgattacagtgctatataggatagggctatatgtgtcttcatttttcccactgtatattttaatagtcattggaaattataactatttcacatcatggctacagttttgggatttaataaaatttaaagacataagtacttccttattttggttaataatattcattttaatagttatttcgattatctcgttgctatgcataactaatcgaagtcaaaatgaaaaacatcaattcacgggtgttagcaagactgaggatagcctattaagctatgttgtaacatacttaatcccattactttcaattgaaattaccaaagtaaacagtttactagtgaatgcaggattgtttttacttttagggtttatttatgtgaggaataattttatctatcttaatccactgtttttgttcttcggatacaacatttttaagactgcgaacgaagaagttttgatttcaaattatgacatttatgatttaaaaaacatggaaaacgaaaaattgaagtgcagagttttgggttag

SEQ ID NO: 95791 - DNA, 918 bp, Paenibacillus popilliae ATCC 14706
atggatattaatgggataataacaatgcttgatagagtacggttagaaaatgtagatctaaggttgtactttacgcgcaaacaaagcaacgacacctatatttcatattcaccgactatttcaactgatttacaagccgatttaattagcattgttactaacgctcttaaagaagtaagagaaacagaacaaaggccttttaaccctattggtacagtagatggctgtgtagaatactgtgatgttaaagaaataatgaattttcaagaaattctaaatagtattagagaggacgtggttattagaagaagaatagctacggaagaaataagaaaactaacattttattgtttgaaaatagtacttgaagatcaagacgaattgatgatttttagaagagtcacaaaatttaaccggcttaccaaaggattaattggtaggtttatcgagggagactttgaaaaattaaatccggatttgctgggtatcgatggcaatgtagatgttgtaatatttagagatgagatgctggttctgaaccatatttcattagaaagaatattttcaattaaagatcaatatattgagaaagcatcttatactttggaaattgttggacgatcccggagaatacagaatttcgaacaattccgagaagattgcttagctgatggaaggataataagggctttaacaaaaatcctggatgatgaggaacggattcacaagtgctttataaattttgaaaatgtgttagaggttgttgatatttttgaactagatattaaatttgaagaaggaaatactgttttagtctacgaagaaaaaagccaattactggacatcacaagactaataagagattcgttttatcgaagcttgataaataacagagagggtatcgatgaaggggtgtaa

SEQ ID NO: 95792 - DNA, 540 bp, Aggregatibacter actinomycetemcomitans Y4
atgctttttatcagtgcttatgcgcctttaatgcttattatactgattaaacaagtagattttaatatgccttactacttaaactctccgatagtcagtttgatattattaatagtggcagtatcaagtagcgtgataacgattttaactgcaaagagtgtgcgagctgggctgatggttacagtgagtaaagcgtctaataaatcaggagatatgttcggttatacaataccctatatgctttccttcatgagaattgatttgagtgaatggcaaaccataactgcaataattctatttttatcggtgttatttataatggcgtatcgaactcaaacggtttttattaatccgattttggctatttcaggatatatgttaattgattgtacatttaaacggcaggagaaagaaattcaagctatggtaataacaagagagcctattagtgcaggagattcagtttgcttggatcggctttcacattatttgtatattcgttctcaatcggactatcaaaataaagaggaatcagtatga

SEQ ID NO: 95793 - DNA, 942 bp, Aggregatibacter actinomycetemcomitans Y4; identical to SEQ ID NO: 95629

SEQ ID NO: 95794 - DNA, 519 bp, Escherichia coli KTE138
atgcttaatggatttgctcgctatgctttgactgctagttcggttgccccagtttgcctgacattggcattcttagcttatattaatgataattataagattcttgtttcctcaattcttttggctgtcgtaagtgtggttttttgtgtctttataatcaagcaagcacaaaaatataatccggtcacattgaaaaacttagaatcggcatctccggcagataaggaaataaccaactatttcttgacttacttatttccacttatatctgggccgaccacttttatggattggcgattagccctgtttttttatttaagtcttttcttctacataaagcactcgtcttcgtatagtttcaatccaattttgtctatcatatttggattcaagttttatgaagccgaagatgacactggggtgagttttgttcttttgtcaacaaaacctcttaccaatgcgaagatcaaaggtttgagggtaaagaagcttactgaacatacctatatgattgtataa

SEQ ID NO: 95795 - DNA, 894 bp, Escherichia coli KTE138
atggaactttttgcgattacagacagcgaaataccgactagaataattaagattgacatagatgctcccgcacaaacggtagtagaaaatctatttagaactcagaggagtgagtttataaatgaagatatcgaagaaatagagttttgtgcatcttataatgttcaggatggtgagatattttccatcaatccatttgatgacgaaataggcattattaatgcaatcgaacggcctgatgctgttccagtttgggaccccgatgatgtgtcagttcattatttcaaagcgttatttacgggtgagccagcttcgaatggtaatcctactcaagtttggcttcaatgtttcgatagacgacaaataattaataatgaaaaatcctttttccaagtagtaactcagcctggaaatagattctcagtgtccactcgtcctggtttttcgcttagtgatcgattaactgctattcttgtgggtgataaattattgttcaagagtttctttatgctccggcgattttttaacatggaagagtattttaatgaagctactagagaggatttagataactttatcggtaatgatatatttcatgtggaaaatgctgaagattttatgatgtttgcagattctgcaattaaaaagaaagtatctttgataataagttctggaatactcaacgatcagcctattgaaaatctaattgagtgtgcccagaagattggatatcaattaggtataactaatgtgaatggtgataataaaatcactatgccaaactctaaaagagaagtgaagcaactattatatttccttgatcagggctacttcaattcaataataacaaatgagttaatgttgacgaattcgaagcgaccaataagaatttga

SEQ ID NO: 95796 - DNA, 582 bp, Rhodopirellula baltica SWK14
atgaattcagtcttcaaaaaggtcaatctctacgtcctgtcgcttggcttgctgttcctcttcattgtcatcatcacttttgagcctgtgaccacatcatccggcttgcgaactctggtgggttggagcgatctggcaacggcgaattacgtctcgttgatcgctgcctttggcatggcgtactgcggcttcgcgtatgttttatttcgccaccaactgaaaggagcaactgaacttccttttgaggtgacgagaatcgagagcgttgagtacgaacacttaaccttcttggccacttatgtcgtccccctgatcagcttcgacttcggcagcgggcgccagctactcgttctggggctgttgctgattgctatgggagccatttacgtcaaaacggacctgttctacgccaacccatctcttgccctcctcggctttcggatctatcgcgtggacgggaacttcaaaacaggcgatcgtcacggcatcatcctgatctgccgcagcaaattgaaagtcggccagaaagccagctacatcaaacttgacgagaaaatttacttcgcgaagggaagcacctga

SEQ ID NO: 95797 - DNA, 963 bp, Rhodopirellula baltica SWK14
atgaatattgacgaactgaaagaaaaccttcgcccgtatctcgcgactgacgacatgggtatatcggtttacgccgtgatcaagggagcggaagaggaggggccaaaacgcctggacatcgagcaagactcgcacgattgtttgctgcaaatgttcgcgacacgaatcagaagtcagattgttgatcgcaccgaagtcagcgtgatgaacctttccgactctgacgaacggcaaaacgtgatttatgaatacgaccttgaagttccccaggaactccaggctcttcaggccgttacgcaaaccgacgacactgggcttctaagtttaaacgatgagtcactttctcaaatcaaagcgatcgttgttgaaatcgggaacaacgagggacagctcgttctttacaagacgatggctccgatcaacgtattcggtcgcgacaagatttttctaaaaaagcacgagtcacgactagctcgcatcgatgacgagtttcttcggatcagcgatggctttcaaatgttgcacgttgacggcacgctgatggtacttgacctgaagactctcgaaagcaaatttggcttccatgatgtcgtcaaacgcgaagccgagacgggtttgcagacaattgaagatcttggattgcttgagaacccggaaacccttcgtgaactgattaatgacgttaagtttgcacggaaattaacgaaggtcgcacgctcctcgcctgttctccaacagatgattagcaatgatcggatcattgaattttgcaagaactacccgactttgaagaacattaaatttaatagcgcagaagacaagatcttactcgacacacagaagtcgaaagacctgttcatcaaattgctgatggatgactacttagtgtctcagctgaccagtcgtcactacgagagtttggcgaaggacgttgctgaacctgccgccgagtcgattgtgtag

SEQ ID NO: 95798 - DNA, 624 bp, Leptospira terpstrae serovar Hualin str. LT 11-33 = ATCC 700639
atggaaaatcaaaccaaattaactaaaaatgctcgcttctctctatttatagtatcctactttccattatttcttattttaactattcgccaattatatgattactctatttatattcattgggcaggattaaatttagagggattttttatttatttacaacactttggcgcaattacgattttttccgtgttaactctatatggtttcactggacttatctttcttttaaaaaatatgaaaagacgtgtaacctttagcggcgatactgcaattattacggatatagaaaacaaaaataacgaatcattgtcttatttatttacctacctattaccatttctttttcaagatctatcaaatccaataagtcttttttccctattaattctactaattgttaccttttttatatatacaaattcatcaatgttattaataaatccaactctaagccttaaatatacgatctttcaggttgaattcaaatatttaaattcaaataaaaccaacaaaggaatgataatctcagaacaaagccatcttaacgaagacgatataattaagattaaacctatcggaagcagattatattattcaataattacaggaactaatcaatga

SEQ ID NO: 95799 - DNA, 996 bp, Leptospira terpstrae serovar Hualin str. LT 11-33 = ATCC 700639
atgaaaaaagtaaaggaactcgattctattattgatatactttcttcgcaaaatcttaatgtaactttctactttattcagagaaaaccaaaaaaaggtctaaaagaaaaaacaattgataaatacgattattttccgatcaaagcagatttatccaacgaaataaatttattttttaaagattcactactcgaatctttaaaaaatttatccaataacgggaaatacaatattataaattatcaaataattaacgacgatttaagtggtataataagcaaactaaaagaagacaaaaatctttcctttcataagacaatagaactcttaatgaataagaaaacagaacacatgaaatcactttctgatgtaaaaaaaaatttatgggcatatgctattgaatttaatgataataaaaattcttttctctgcttcagaaaatcaacatcttcaaagattgccactgatgataaaaatttaagagaaaagttatcaagctactgggacagcgctgatggagaacttaaaatttctccaaatgaaacagtgagtttcgactcaaggattgactgtttattctttggagatacttattatatacttaacaaatcaaatttcgaaattcttgttggtatggaaaatcaatttcttgaatttgctaaagaagttattgaaactttaacaaataccggcttaatagaaggaatcgctctccttgaaaaggaaattaaagaaaacaaaaatattcttaaaaccgtttcaaatataggaaaaaaaggaactcagactactttagatagccatgaaatcacaaaaatgaaacaagttcttcaacagatggaacaaaaagaattaaaattatcacctagcaataaaattgttttggagaatactgatgatgtaaattcttttctaaaattattgaatgattattataaacaaggccttgttacagggaaaatatatggcagtcacagcggtgaaataataccatag

SEQ ID NO: 95800 - DNA, 582 bp, Aggregatibacter actinomycetemcomitans serotype a str. A160; identical to SEQ ID NO: 95710

SEQ ID NO: 95801 - DNA, 942 bp, Aggregatibacter actinomycetemcomitans serotype a str. A160; identical to SEQ ID NO: 95715

SEQ ID NO: 95802 - DNA, 300 bp, Escherichia coli Nissle 1917
atgccgttggtctttactgatttaagcaaaccatcaaatatagttaattttttgtttgttttgattatcgtcggttttttgcacatcaaaacaaaaagaattcactgcaacccaacattgtcattatttaatgtttctgcctataagattacttacagtgtggtagctaatggaagggaaaaaacgcaagacggtgagttgatagttttatctaaagatttaataaaagaaaatgattttatcagagttataaatcatgatgattatttaacgttcgcgaaaaaaatcatagaggaatga

SEQ ID NO: 95803 - DNA, 1143 bp, Escherichia coli Nissle 1917
atgagtgacgatgccttagatcttgatgctttggagcataatgaagaaaaagcacaagagcttttagaactgtataagcattttgattgtgatattaacgatgttacattgcacacttactttaactttaaaaataaaggtaaagcgggtgctaaggactcttttagctataaaattgccatccttaaaaatgacagtgagctaaaacagtccattattgataatgtgataaagaaaactatatctgatttagaaaatcgggttgtgatagtatcagatgttaatacactaagtgaccgcaccaacaccatttcatttttaaatgatgctgagcagtatgataatgagcaaatgaagtttctgactggcattgtgtttgatgctgggtttggtggtgatggcaatgaaaatatcccaattgttgattttgacagtgtggatctaatatcaaaagttgactcaatcattttcgttttgagtaagaataatgacgacaattgtataaccatatacaagaagcaatatccagttcaaaacttatcaagaaagaaaaataatttttatgggtttagcaaaaaagaactatctcgagtagatcaagatatgatttctattgatggtaaggcatctcttgtttttgctggcgatacggtatttatctacgaccaaaatgttttcgagcgtttttttggctataaagcatggataaaaaatgctgccactgattttgttaacaatatgtccactcgttttaagggatttgttgacttaagcaaatttattgagcgagtaaataaagatagtcatgatgcggatgctttttctcggaagctagctaaggcgtatgctcgaagcgaaacaaagcaaacgctacaaacaataacaaatgaacatcttaagagtgttctagatgaaaatggatatttagcaggtgttttaaagtataaaaaaggtgatgctacgatttgcatcgcaagccataaccagcaagatacgtttatcgctatggtatccgaaggcgtattgagatcgttgattacaggcattgattatttaagccttgggtcaaagcggaaaatatcgtcagcagcatccaatactactaccagtaccacttcggattcctcttccgctgccgtgtga

SEQ ID NO: 95804 - DNA, 618 bp, Haloferax larsenii JCM 13917
atgcgcaaattcagagcaccggtcaagttcattctcttcctgagctcatacgtcccgctattcttcatcatggcgttgaaattcgggaaggtccctccactcctgattgcgggttacaaaattcctcttatcaacatcccttacatcgatttccggctatacatctcgtacctctccatcgggcttctggtgctttgtgtattgttcaccgcacttctgtaccggatggtcacagttcattcaggtcgtgctaccactcaagagccagtcgacaagtaccagaagcggagtgaactgctttcgatgtacctactggtctacgtttttgttttcgcaggtctggatttcacgaccctgctcgacctcggtatcttcctagtgttcttcggtatattgggagttctccaaatcaactcggagatattgcacgtcaacccgatgttagggcttcggggatatcaggtatatgaggtcacaagtgacgaacaggtgttattggtaatcagtaagtcctcaattgaggaaaaaatgatactgcctgagacaaaagaggctgacaacccgcgaaagaaaatcgaggttgtctccctcggtcgaaccacatacctcgcaccataa

SEQ ID NO: 95805 - DNA, 972 bp, Haloferax larsenii JCM 13917
atgtctggaaaactgaaccccgctgaaaaactcaaggaagcccgggagtttgcggtgggacggacggaagccgagtttttgcttgttcgaaaacagggagaatccccggacgtagggaagcttcagcttggacgccttgtccaacaggagattgcccaaaccgtctcagacgccctcacagaacagattaacaacctccgtgacggtcgaacacgagcacggcctctagacgttgcaaacacgattagcgaggagtcggtaatacagtgtgtcaggatagagaatttaccggactccgagctattcgagattttgaattccagagacaatgatgggacaacgacgtattccgaagaacctgagccgaattttcagctcatccgcatcagtgagccggacgggaaggttctgattggggttcaaaactacagtaacgcgaaattggtcgacacgacaaacgaactcacactctggtatcaaaacgaggagtacgagcgcttccaaggggacctattggtcatccgtccaaacctcaacgccatctgctacgatgggtgggtgttcattatcaccccaaagtcgttcgagagcatgttcgatatgcgtgaggagtacagaaagcgagcggaggaagctatcgaggcgttcgaagatgcggggattacctttgctgaccgcgagacgacgactggatggatgctgagccatatcaatatgcttcgagggatgtacgaaatctatgataacggtattcatgagcaagccacgcccgacaaaatcgaggccatgattcaaaaatacaatttggatacccgcttctcgctagactacgctcgtcgaaacggtcaaatcgagttgggcgtagatgaataccagcatacttggaagctgattaagctgcttgcggcgaaatatgctgaggacgatatcatgggcgagcaatgggaaattgatagcggacagcggctctaa

SEQ ID NO: 95806 - DNA, 615 bp, Edwardsiella tarda ATCC 15947 = NBRC 105688
atgagagtgaacaaactgcgtttaggagctagattttcactattcattgtatcctatcttccattattttttattatgtgttttattcaattatatacacataaagattatttacattgggggggggtgagtctagattcaataactgtgttcgttaaatattttggcgcggtgagtattttaatcttattttctctctttgggattataggccttgctatatttctaaaaaacataaagcgccgatgtaaaataagcggacggcgagtccaaattatagacatcgaaaataaaaataacgaatcaataagttatctctttacttatgtgattccattcgtatttcaagatttatccacattatccaatgtcatcccaattggtatattgctaatggtaacatttttaatttatataaactccagcatgatactaatcaacccaacaataagtatgagttatacactatatcaggttagctatcaggatgtagaatgtgggaaaaagcgtagtggcatgattctaacaaagtctaaatatctggaggaaggggatttcattgatattgaagacgttggcccaaaacttttttatgctgagttattagaggaatga

SEQ ID NO: 95807 - DNA, 1020 bp, Edwardsiella tarda ATCC 15947 = NBRC 105688
atgctaaatctcgaagatttattagagtatgctgagaatttaaaggacgatgatgacgtaaaaatctcattatattttgttactcggcatcttaaagttggcgtaagtaaagcagctaaagtaacagacaaatatgacttttatattattaaagctcctatagctcaagatgtcgctaattttttcaaacaaacactttcaaatcaaataatatctcatgcatcaaaggatgatgttgagatgaaaaagtatactgtcattgatgatgatatagataataaaatttacgcatatgcaatgaataatgccatttcattttcaaaagtcataagcgaagatataaaaagtgacaaaatcagaacaatcacatctcttactgaaatttctgataacctttgggcttactgtataaaagttcaaaaaaacttagagttaacatactcatttagaaaaataagcaaagggaagatcacaacaagcgatccccaaagtttaaggcagagaatatgtgctcagtttgataaatcagataaagaattgagagtttttgatggcaacgctattaattttgatgataaaattgattgtatttatataaatgggcaattttatgttttccataaaaagagctttgagtctattgtcggtttggatgatgaatttattgaatcatctcagaagacattaaatataatcaaggggtttaatttggtggagggcttagacattattgagcaagctattttatacaaaccttctttcagaaaaacccttgcacatattgcagaaaaagggaatcatgcatcattaagcaaaaaagaagttacctcaatgaatgatgtattaagaatgtttagcaatgaacagtttacaattaagaatgagaaaattgtcattgaaaatgaaaagcaagctcgaaacttccttcgattacttaatgattactacaagcaagggatgacgacgaaaaaatactatggtacagaaagtggtagcttagttagcccaattaataagtga

SEQ ID NO: 95808 - DNA, 600 bp, Citrobacter freundii GTC 09479
atgaaacgaaaaagcacattcaacaagatgggactatacatactgtctttgatgttgctgtttgtttttattatcattttgagcgcaaaaatcccattttgttatggctcctcctgccattttataggattttatcaattagcttccagcaacataatctcaataatttgtgtaatttttatagggatagcattttatttctatagaagatttaaaggattgactaaggtcaacaacgccgattgtgtaacaatcactgcttgtcaaagtgagagttatgaaagtttgacttttttagccacatacatagtaccttttatgggattcagttttgatgacccccagaaaaatctcgcttactttctcttaatagttgttattggtttaattttcattaaaacggataagtattatgcgaaccctactttggcccttttcggttataagctgtatagagttaacatttcttattcaggaagcagtgaagtaaaaaacgtcattgcaatctcgatggatgtgctgactgttggcgatcaagtattctacagtttttttgatgactacgttttcatagcaaggaaaaaagatgaatccagatga

SEQ ID NO: 95809 - DNA, 960 bp, Citrobacter freundii GTC 09479
atgaatccagatgatttgaaggtagaaataaacagtattttcgaaaactactcaggaattagagtaatcttcattgtaaaaaatgaagaggactactccttaaaactttcaaaaatagataacaaagcatttcctaaaatcattgagggttttaaattaagtcttacgcaagacattattgagaacgaagatctaactatccctcaactctcaaactttgatgatcgcaagaatgctttatttttattcgactatgagcagaaacctttagaatttgattttataacatctgctatagaaatcccacctaactcacaggatttctataattatgaagataaattcaagaacatcaaagggataatcattcagatacgtggtaataataagtgcttatcgctctacaaaaacaaaaccccaataacagtttttgagcaaagccgtaaagttttcaatttagtaccagatccggatggtttccttaaagaacttcctgagcaagttttcagattagatttcaactatgacttaatacttttagatgataacttcattataaaaaatctaaccacgcttgaaaggactatgaaattccatgaggtcattcaagctcaatcggttattgctttaaaagcattaaaagaatcaaatcttattgaagacctttctcatcttgaaaaaagctcatctgaaatgtctttctcaagaaagctggctaaaatttctaagcactctccagtattaggtataattgatgttcctgttatcattgagtatgtaaaacaacactcattcctctcaactgtcatgatagttagcgatgatggtacgaaactgatagttaagacaaaaagatctcaaaaacattttattaaattgctcagcgatgactatttagaatcacctctcactaaaatactctatgactcattagctaaagatgaactaaaagcaaactga

SEQ ID NO: 95810 - DNA, 471 bp, Gluconobacter thailandicus NBRC 3255
gtgtacgcgtggatagtctggcgtaaccagcaacacgccattgcgattggtattgtcgctgcctgcgcgatgctggtattgatctgcgtgtacctgcttcggcaggcccgtacctctttggaacgtttcccgctcaatattaccagtgttgagccagccgatcgcgagaatatcgcgttcatgcttctctatctctctccgctatttacttccgaacttgggcagatcaacatcaatctgctcataccaacactgttgatattcacacttttgacggcaacaggatataactatcatttcaatccactgctcggcctagccggctggcatttttacaaagtcgagtcttcagaaggcgtgacctacgtcctcataacacgcaagcagctcaggaatacgagcacaatcaatcacgtcggccagttaaccgaatacattttgatcgatctagaggatgcgaatgcctgttaa

SEQ ID NO: 95811 - DNA, 837 bp, Gluconobacter thailandicus NBRC 3255
ttgatcgtgaagcgcatcaaagtaactgctgcggttcagaatcagctagaaggaatttttatccagcaggagcagatgtttgttggtggcgtaactgatgaggtaccgtttgatggtggatggagccccgacccacacgagcatcttgtggcccaagtgacggatgaagcagccgccatttttgcagctgctcagggtaacatcgtagcaatgccagaagtcgatccagcgaacttcgaggctgagaacatcagagcgctgggtgtcttagtgcaacgcccatctggaccacgcctgctgttacaagagttttctgcgcgccagatgcttgagcgtcggtttagtctaatacttgatggcaacaccttcaatcgactggttcagcccgcatttgcgattggagcctctctagcgggcttcgtagaagatgacaaaatcaagttccagaaattcagccgtatcaagctgatttttaacctaaccagcctttatcaggaagcgactgatactgaggttgaaggcttctgtggtcttgaatgcatcagtgtcggcgacatcggaaaattcaaaaacctcgctgatcaaaagatgcgaaagctgatcaatgcgatcactaagcgaggtacgctaaataattttacacctgctcagattcaggtcgcagcggccgatgagaactttcaaattgcggtcgcagacgggaagatcatcattccgtcaatgaaagcagaagcgaaggcgctccttcatttccttgacaatggcttatatcgtggcccgcttggcggagaaatttttattactaattcaaagcgggcgctcacacccacgccctag

SEQ ID NO: 95812 - DNA, 585 bp, Rhodopirellula europaea SH398
atgaactcgaacttccgcaagatcaatctctatgtcctctcacttgggttgctgtttcttttcatcgtcatcatcacgtttgaaccgactatagcattttcagaactggcgaaactgcaaggttggagccgactggttaaagccaactacgtttctatgatcgccatcggtggaattgcctactgtggattcgcgtatgttctcttttgccatcagctcaaaggagctaccgaactaccattcgagatcacgaaagtggagagcgttgaatatgagcaccttacctttttggcgacctacgtcgttcccttgattagttttgacttcggcagcggccgtcagctggtggttcttggactattgctgatcgcgatgggagcgatctacgtgaaaacagatctgttttacgccaacccctcgcttgctcttctagggtttcggatttaccgcatcgacggcaattttaaaatgggtgatcgcaccggtctcatcgtcatatgccgaggaaaattgacagtcggccagaaagccagctacatcaaactcgacgagaaaatctactttgcgaagggaaaaaagaaatga

SEQ ID NO: 95813 - DNA, 966 bp, Rhodopirellula europaea SH398
atgaacattgacgaactgaaagacgcccttcgaccatatatttcgattgaagatcttggcattacggtctacgccgtcatcaagggagcagaggaagacggcccaaagcgattggatatcgagcaagattctcatgattgcctgctgcagatgtttgcaaagcgaattcgcagtcagattgttgaccggacggaagtcagtgtaatgaacctttccgactctgatgaacgacaaaacgtaatctatgaatacgacctcgaaattccacaggagctgcaggccctgcagtcagtgacgctcacggacgacacggcactattaagtttgaacgatgagtcgctctcgcagatcaaggcaatcgtcgtggaaattggcaacaacgaagggcaactcgttctgtacaaaacgatggctccgatcaatgtttttggacgcgacaaaattttcttgaagaaacacgagtcccgactagcgcgaatcgatgatgaatttcttcgcatcagtgacggctttcaaatgctgcacgtcaacggaacactgatggttcttgatctcaaaacgcttgaaagcaagtttggctttcacgatgtggtcaaacgtgaagcagagacgggattgcagacaatcgaagagatggggctgctagagaatcctgaaacacttcgcgaactgattgatgacgtcaagttcgctcgcaaactaaccaaggtcgcccgctcgtcacccgtccttcagcagatgatcagcaatgatcgaatcatcgctttttgcaagaattatccaacattgaaaagcattaagttcaacaacgatgaagacaagatcttgctcgatacccagaaatcaaaagatctgttcatcaagttgttgatggacgactacctagtgtctcagctcacgagccgccactatgaaagcttggcaaaggacgttgctgacgccgatgcgactgcagcaactgcctag

SEQ ID NO: 95814 - DNA, 585 bp, Xanthomonas axonopodis Xac29-1
atgcagttccagttttggtcagcggtgttgctttttctaggttcctacctgcctttggctgttattttgatggttcaagacatcgccacaaaatactggagtgcaccactatgcggttggaaagggcaatggaattgccagttccagatccttgcccattcgtggttggcgtgggggactgtagcggtgacttttggggcgttgcttttgatggtggttgcactgcgctcggttcgtctcccgcatcgcgtgcacgtgcaagaggtcaaggcgattcccaatgacctgatcaactacgtgcttccttacgtggtgtcttttatggggcttagctatgctgatccccaaaagctcggcggcttcttggtcttttgggttgtgctcttcctcatcacttatcgttctggccagattctgatgaaccctttgttgatcgtgctggggtggaagctctacgaggtcaaggtaggtttgggtcaaagcggtgcgatcaggatggctcgagtcttgaaaaagggcccgcttgtgcccagcattcagatggcggaagagatacaggacgtttatctaatgagagatccatga

SEQ ID NO: 95815 - DNA, 930 bp, Xanthomonas axonopodis Xac29-1; identical to SEQ ID NO: 95555

SEQ ID NO: 95816 - DNA, 648 bp, Escherichia coli KTE51
atgaaaattagaatgtatctcttatcaatgttgtttttatttataccgataacaatatatttttctggtattgataacgtatggtctgttttagataaggccatgtcttcgtgttctggcgcggatggaaaatttcaatgcgtactcgactattcaaatagcagattaacattttctgtattgaggtcagtgatctgcggggctttgattttaacttgttcttatacatacatttggtatcgatgggttttgaaaaacttagactccggtgcggtgtcaagaaagttaaaggtcgtttcatgtaaaaaagaatccggtgagtatctttcttttttatcaacgtacataatgccgttggtctttactgatttaagcaaaccatcaaatgtagttaattttttgtttgttttgattatcgtcggttttttgcacatcaaaacaaaaagaattcactgcaacccaacattgtcattatttaatgtttctgcctataagattacttacagtgtggtagctaatggaagggaaaaaacgcaagacggtgagttgatagttttatctaaagatttaataaaagaaaatgattttatcagagttataaatcatgatgattatttaacgttcgcgaaaaaaatcatagaggaatga

SEQ ID NO: 95817 - DNA, 944 bp, Escherichia coli KTE51
atgagtgacgatgccttagatcttgatgctttggagcataatgaagaaaaagcacaagagcttttagaactgtataagcattttgattgtgatattaacgatgttacattgcacacttactttaactttaaaaataaaggtaaagcgggtgctaaggactcttttagctataaaattgccatccttaaaaatgacagtgagctaaaacagtccattattgataatgtgataaagaaaactatatctgatttagaaaatcgggttgtgatagtatcagatgttaatacactaagtgaccgcaccaacaccatttcatttttaaatgatgctgagcagtatgataatgagcaaatgaagtttctgactggcattgtgtttgatgctgggtttggtggtgatggcaatgaaaatatcccaattgttgattttgacagtgtggatctaatatcaaaagttgactcaatcattttcgttttgagtaagaataatgacgacaattgtataaccatatacaagaagcaatatccagttcaaaacttatcaagaaagaaaaataatttttatgggtttagcaaaaaagaactatctcgagtagatcaagatatgatttctattgatggtaaggcatctcttgtttttgctggcgatacggtatttatctacgaccaaaatgttttcgagcgtttttttggctataaagcatggataaaaaatgctgccactgattttgttaacaatatgtccactcgttttaagggatttgttgacttaagcaaatttattgagcgagtaaataaagatagtcatgatgcggatgctttttctcggaagctagctaaggcgtatgctcgaagcgaaacaaagcaaacgctacaaacaataacaaatgaacatcttaagagtgttctagatgaaaatggatatttagcaggtgttttaaagta

SEQ ID NO: 95818 - DNA, 318 bp, Escherichia coli KTE75
atgttaaataagcttgccaaatatcttcttactgctagctcagttgctccagtatttttcaccttagcttttctttcatgtatatcaaagcactataaatttatgttcgcttacttatcattgtgcgcaattatacttttactgtgtttcttgattgttaaacactcaattaaatataattccgtaaccagtaagaaattaactaccgcttctccagcggacaaggaaataaccaattacttcttaacctatttatttcctttaatcagtggtccagatcctttatggatattaggattgcttctttttttgctgtaa

SEQ ID NO: 95819 - DNA, 804 bp, Escherichia coli KTE75
atggaattatttgcaataacagataatacagttggcacacgtattgtcagaattgttactgacagaccgactcaaaatgtagtcacacagttattcagtgaacaaaaaacattttttgaagaacgctacacagaaggtgtggaattttcaggtggatacatcactagtggagatgagttttttgtcattcctgactttgatgatgttatcgctgtattagatgccattaataatcccacatctatccctccatgggagccggaagaaatatcagccttcaatataatcgctcttttttcaggctatcctgaagaggatggaaaacctgtaactgcattaattcaaagcttcgataaaagacaagttattgataacagaaggacaattttacaaaaaatgtttcaggcaagcaatactttttgccagtctactgagcatggtatagtcattgacaataagctaagcgctattctcgcaggtacagaattaaaatttaaaagtttccatatgctccgcagaatatttgatgtagatgcttatttcagagaggcgactaatgaagaattaacaagtttttcttctcatgaaaaattttcagtagttccagggtttgatttaacaacaattgctgactctgttattagaaagaaagtttccttaattaataaatcaagaatacttgaagactactctgtgactgagttaagaatttcagcgtctgaaattggtgttgctctagaagctgaaaaaataggtgaaattgaaaaaataaaaatgccgcaaataagaaaagatgtaaattaa

SEQ ID NO: 95820 - DNA, 615 bp, Escherichia coli KTE9
atgagagtaaataaactacatttaggtgctagagtttcgctatttatagtgtcataccttcccctattctttatcatgtgttttgtgcaattgtatacttatagaagctatttaaattggaaaggtataagtgttgaatcattaactattttctttaaatactttggcgcggtcagtgtcattggtgtattatcattatttggtattgtaggattaacaatttttttaaaaaatataaaacgtcgatgcgccactagtggtagaactgtaagagttatagatattgaaaataaaaacaatgaatcaataagctatctttttacatatataattccgtttgtatttcaggatctatccactttaactaatgttatacctatagcaatattgttaacggtaacggctttaatatatattaattcaagcatgatacttataaatcctacgataagtattaattatactttatatcaagttacatatttggatttagaaagcgacaaaaaacgcactggtatggttttgactaaatcaaagtatttggaggaagatgatcttcttgatgttgaggacgtgggcccaaaacttttttatgctgaatcccataaggaatga

SEQ ID NO: 95821 - DNA, 1023 bp, Escherichia coli KTE9
atgttaaagcttgaagaattattagagtatgctgagcaacttaaggatgatgatgcggcgaaaatatcgttgtatttcattactagacatcttaaagcgggtatgagtagaaccgcaagagttgttgataaattcgattttaaaatcattaaagctccaatcgctccagatattgctaaattttttaagtatactttatcaaaccagattatttctcatgcttcgaaagatgatattgtgatgaaaaagtatactgttattgatgatgatattgataataagatttatgcctatgctatgaataacgcgatatcgttttcaaaagttattaataacgatataaagaatgataaaccagttgtacttacctctcttgctgaggttcagaatgatttgtgggcctattgtattaaagtccaaaagggggctgacgtcacttattctttccgaaaaatcagcagggggaaagtcacaacaaatgaaccacaaaatatgactcagcgcgtattcgctttgtttgataaaacagataaagagttaagatcatttgatggcagcgcagtcaattttgatgacaaaatcgattgtatttatataaaagatcaattttatgtatttcataagaaaagttttgaggctattgtaggcttggaggttgagtttacagaagctgcacaaaaaacattaaatacaattaaagaacttgatcttattgaaggtttagatgttattgaacaagctattcttcataagccatcactgagaaaaattctcactcatatcgctgagaaaggtaaccatacggctctggaaaagaatgatgttcaagctatgaatgatgtgctaaaaatgtttcagaacgaagagtttaagaccaatgagcatggtaaattagtcatagaagatgagaggcaaggaagaaactttctcaaactgttaaatgattattataaacaaggcatgactacaaaaaaatactatggtacggatagcggaaatgtgattaaccctattaaggcgtaa

SEQ ID NO: 95822 - DNA, 594 bp, Escherichia coli KTE101
atggatagcaggccatatcttaaaacagtactatatatactatcactatggcttctatttttatcattattaattatgtcctacgataaggttttgataaaaaatgtgtgggactatatttttactgaaaactttactttctcaatctcgtcattgaaagtgagaaatatcgttttcatagttagtttgattttcatttttattggtgcaattattttaatagtccttgcaaatagctttggttcgggttggtctgttgcatgcactgtctcggatatcagcaatgaaaaccatgaacatttagagtttttaaccacttatataatgcccttagttttcactgatgtcgatagtaagagaactgtattaaatttagggttgatgatatttgtaatcggcgcaatatacgtaaagacaaaccggttttattctaacccatcacttgcaatactcggattcagaatatacaaagctaatgttcatgatcgtggagtgaaaaaatgcacagtaatctgccgcagtgttctaaagagtacagataatataaagtatataaaaatcgacgatgaaacttatttggctaaaatagtgtag

SEQ ID NO: 95823 - DNA, 972 bp, Escherichia coli KTE101
atgttcactaacattgaaaatattttaaaatcgaaacgcatctctggtgaagctttttttgttgctgatgttcaaggtacgatagatatatttaaggttaaccttgaacctgatgctgaaaaagatctgaccacttcattttctaaaagcttaatcaatattattattgaacctaacagaggtaaagtggccgttccacttgtatccactttattagaaagagataagcaagttttcgaatatgatcacttaacaattaatcacctcccaattgaatttactaaaatgaacaacgtgctaaatttcggtgtcaatgggaatgcaacacagtttgattttgcaacacaaagcctcacatcggtaaaagccgtaatttaccacctttgtgatggtaatggaaacagcgtagtcatttaccaacataaatatcctgtttctctacataagaaaacaaaaaaatctttcttgagtctaaatggcagaaccttagataagatcactcatgacagtattgatataaatgacactattgacttcttcttttttcagaataagtactatgcgctaaacattaagcttcttgaaagaatgtatggattagaaagtgtaatagataatcttgcaaataactcaacgccattaataataaaccttggaattgttaatacacaaggtatgccagtgccactagatattttcaaggacatgtataaagacagagcatttatgcgtagacttgctatggtttcaaaagggaacttagtaaaaacgggagtatcagtccctcaaatacaacaagttatgcaaaaattccctgtatttcaacggaatattgatctaacaggaggattaataaaccttaatactaaagatcaaaagagatactttattcggcttctaaataatgaagcatcttttgcagcacttgataactcgcccttcctggctgttgaaaaagactccgctgcttaa

SEQ ID NO: 95824 - DNA, 519 bp, Escherichia coli KTE165; identical to SEQ ID NO: 95658

SEQ ID NO: 95825 - DNA, 885 bp, Escherichia coli KTE165; identical to SEQ ID NO: 95659

SEQ ID NO: 95826 - DNA, 282 bp, Escherichia coli BCE019_MS-13
atgggattcagttttgatgacccccagaaaaatctcgcttactttctcttaatagttgttattggtttaattttcattaaaacggataagtattatgcgaaccctactttggcccttttcggttataagctgtatagagttaacatttcttattcaggaagcagtgaagtaaaaaacgtcattgcaatctcgatggatgtgctgactgttggcgatcaagtattctacagtttttttgatgactacgttttcatagcaaggaaaaaacatgaatccagatga

SEQ ID NO: 95827 - DNA, 960 bp, Escherichia coli BCE019_MS-13; identical to SEQ ID NO: 95809

SEQ ID NO: 95828 - DNA, 273 bp, Escherichia coli 2780750
atggggtttagttttgaagacatgcaaaagaatatagcatatcttttgcttgtagtagtaataggcattatttttattaaaacagacaagtattatgcgaatccaactttagctctgtttggctttaaactatacagggtaaatatactacacccaggaagtggagaaacaaaaaatctgatagctatttcaaatgatgtattaaaagtggacgataatgtttattatagtttctttgatgaatttgtttttatagcaaggaaaaaaatatga

SEQ ID NO: 95829 - DNA, 948 bp, Escherichia coli 2780750
atgactactcagcagttaaaagaaaaaatttcaaaaataattgataactttagcggaatcagggttgtatttactactactgctaatgaactaaagctttccagaattgaagggagtgcattaaatagcatagctgaagggtttattgacaaaatcaaagaagacattataaataatgaagatctcacctcaccattgctgtccaattttgatgatagaaaaaatgccttgtttaaatttgattacgaacaatatcctgaagaatttaacaaaatcactcaggccatcgctatccctcctaactcacaagattattataaccctttaaataaattcacagatgtgaaaggaattataattttaataagtggagataacaaatgcctggctctttataaaaacaaaactaaccttgcagtattgagaaatagcagaaaaatgtttaatttagtccctgaccctgatggatacttgaaacaactccctaatgagatattacggttagatttcaattatgatctattatcaattggtgaggatttttacattaaaaatcacaagactcttgaaactcaaatgaaatttcatcaagtgattgaagcccaggcagttattgctttaaattctttacgggattcactactaattgaagacatatcaggtttagaaaagagttcgagagaaatttcattcgctagaaagttggcaaaaatctccaaacattctcctgttttggggaaaatagatactaaaacaattatcgattatgtatcccaacataaatatttatctgcaatacttcagattaatgaagcaggaaataagttattaattaaaaccaagacatcacagaagcatttcattaaactcatgagcgatgattatttacaatcagatctaactaaaataatatacatgagcatagcaaaagacagattagatgaatag

SEQ ID NO: 95830 - DNA, 330 bp, Escherichia coli P0298942.1; identical to SEQ ID NO: 95744

SEQ ID NO: 95831 - DNA, 1008 bp, Escherichia coli P0298942.1; identical to SEQ ID NO: 95747

SEQ ID NO: 95832 - DNA, 282 bp, Escherichia coli 2730450; identical to SEQ ID NO: 95826

SEQ ID NO: 95833 - DNA, 960 bp, Escherichia coli 2730450; identical to SEQ ID NO: 95809

SEQ ID NO: 95834 - DNA, 282 bp, Escherichia coli BCE030_MS-09; identical to SEQ ID NO: 95826

SEQ ID NO: 95835 - DNA, 960 bp, Escherichia coli BCE030_MS-09; identical to SEQ ID NO: 95809

SEQ ID NO: 95836 - DNA, 282 bp, Escherichia coli BCE032_MS-12; identical to SEQ ID NO: 95826

SEQ ID NO: 95837 - DNA, 960 bp, Escherichia coli BCE032_MS-12; identical to SEQ ID NO: 95809

SEQ ID NO: 95838 - DNA, 330 bp, Escherichia coli 2862600; identical to SEQ ID NO: 95744

SEQ ID NO: 95839 - DNA, 1008 bp, Escherichia coli 2862600; identical to SEQ ID NO: 95747

SEQ ID NO: 95840 - DNA, 636 bp, Escherichia coli P0298942.10
atgacatctactaattctaacagtgcatcatgcgacaatataaagttcaaatattatctttattttttatctttgtggattttatttctatctgtttcaataatgtcctttgattgggtttttattgaaagattggttagatttattttattgaagtatacatttgaggatgtatttaacaactttaacaagttaaaagtcaggaactttgttttcattttctgtatttcgatggttttttcgggtatttcatctgtagtatatttattttcatcgttatcaagaggttggggaagcactcataaagtgagtaacgttaaaaatcaaacgcatgaacatcttgaatttttaactacttatgttatgcctcttgtattcactgacgttaatagcaaaagaacagtaatcaacctgctgctgatgatttgttttatcggtgttatttatgtcaggacaaacagattttatgccaacccatcgttggcaatacttggcttcaggttatataaatgtgttattaaaaatgatccttctggtaaggagtacacagtaatatgtagggggaaaatgtctaatgattgtcaagttaaaataaagaaaattgatgatgatactttgatcgcaaaacttatttga

SEQ ID NO: 95841 - DNA, 1008 bp, Escherichia coli P0298942.10; identical to SEQ ID NO: 95747

SEQ ID NO: 95842 - DNA, 282 bp, Escherichia coli BCE007_MS-11; identical to SEQ ID NO: 95826

SEQ ID NO: 95843 - DNA, 960 bp, Escherichia coli BCE007_MS-11; identical to SEQ ID NO: 95809

SEQ ID NO: 95844 - DNA, 282 bp, Escherichia coli BCE006_MS-23; identical to SEQ ID NO: 95826

SEQ ID NO: 95845 - DNA, 960 bp, Escherichia coli BCE006_MS-23; identical to SEQ ID NO: 95809

SEQ ID NO: 95846 - DNA, 330 bp, Escherichia coli 2733950; identical to SEQ ID NO: 95744

SEQ ID NO: 95847 - DNA, 1008 bp, Escherichia coli 2733950; identical to SEQ ID NO: 95747

SEQ ID NO: 95848 - DNA, 330 bp, Escherichia coli P0298942.4; identical to SEQ ID NO: 95744

SEQ ID NO: 95849 - DNA, 1008 bp, Escherichia coli P0298942.4; identical to SEQ ID NO: 95747

SEQ ID NO: 95850 - DNA, 330 bp, Escherichia coli P0298942.15; identical to SEQ ID NO: 95744

SEQ ID NO: 95851 - DNA, 957 bp, Escherichia coli P0298942.15
atgtttttcatcataaacgataatgacaactatatttatcgacgtgttattttacatgatgaaaatactgaacctctcatcactgaaaatttcaaaaaatctatcactgatgaaattataaagagaatatctattaacgataatggtgatgcaataatagataatatcacggatatgaattatgaacataaaggtgtttactattttgatatcgccagcgaagataaaagcactatcattaaaataattgaagaaatatcgtcgttgacagttgctgacaaccctattgactttaaattcaatgacgtaaatctcgataacattattggtcttgtttatcacatgagtgatggtgataaaaatatttttttgtatcaacatagataccccaattttttacacaaaaaatcaaggctctcatttttaggtgagggggatgtattagttcctataccttacgatatgataaacatatccaaagtaattgatttttttgtttttgatggaattagttatgctattaacattaaattattagaagaaagatatggacttactcaagtaattgacaatatggtttctgaagtaactccaaaaatcattgaaatggagattgtcaacaaatctgtcttagccgagccagagaaaatcttcgacgatatgaaagatgatcgtggtttcatgagaaaattagccagagttcttaaaaacggaatattggaactaaatatcgatgttaacattgttaatgagataaagactagtttccccacaataggaaggaatattgatataattaatgatgataatggtatgcaatatataaagctgacaagtaaagcacgcaaaaaagcttttatcagattgttgaatgatgaagccgtacgttcagtcttaacacaaaagccatcgattgcacaaaatcacaaacctgaaaaaaatatcactcccacatga

SEQ ID NO: 95852 - DNA, 534 bp, Escherichia coli P0298942.6
atgtcctttgattgggtttttattgaaagattggttagatttattttattgaagtatacatttgaggatgtatttaacaactttaacaagttaaaagtcaggaactttgttttcattttctgtatttcgatggttttttcgggtatttcatctgtagtatatttattttcatcgttatcaagaggttggggaagcactcataaagtgagtaacgttaaaaatcaaacgcatgaacatcttgaatttttaactacttatgttatgcctcttgtattcactgacgttaatagcaaaagaacagtaatcaacctgctgctgatgatttgttttatcggtgttatttatgtcaggacaaacagattttatgccaacccatcgttggcaatacttggcttcaggttatataaatgtgttattaaaaatgatccttctggtaaggagtacacagtaatatgtagggggaaaatgtctaatgattgtcaagttaaaataaagaaaattgatgatgatactttgatcgcaaaacttatttga

SEQ ID NO: 95853 - DNA, 1008 bp, Escherichia coli P0298942.6; identical to SEQ ID NO: 95747

SEQ ID NO: 95854 - DNA, 330 bp, Escherichia coli P0298942.3; identical to SEQ ID NO: 95744

SEQ ID NO: 95855 - DNA, 1008 bp, Escherichia coli P0298942.3; identical to SEQ ID NO: 95747

SEQ ID NO: 95856 - DNA, 330 bp, Escherichia coli P0298942.7; identical to SEQ ID NO: 95744

SEQ ID NO: 95857 - DNA, 1008 bp, Escherichia coli P0298942.7; identical to SEQ ID NO: 95747

SEQ ID NO: 95858 - DNA, 330 bp, Escherichia coli P0298942.11; identical to SEQ ID NO: 95744

SEQ ID NO: 95859 - DNA, 1008 bp, Escherichia coli P0298942.11; identical to SEQ ID NO: 95747

SEQ ID NO: 95860 - DNA, 330 bp, Escherichia coli P0298942.14; identical to SEQ ID NO: 95744

SEQ ID NO: 95861 - DNA, 1008 bp, Escherichia coli P0298942.14; identical to SEQ ID NO: 95747

SEQ ID NO: 95862 - DNA, 645 bp, Eubacterium plexicaudatum ASF492
atgcaaactgataatttgagtttaaaaagaagtcttgttttgcaatcatttgcacctctttttttgctgttgactatcaagcatttggatataaatttatatcttaaattgatttataaatttatagatatttggagtaaaactgggataaaggcgtttgctatagcaataaatcatacttcctttggaggctttgtagtttcggctatcagtataatttggttgatgattacaattatgattgcattgggattcaatggaatacaaaaggcagggtttaaatcagcaggagagcaaataataatagaagattcgcccaatgatggtggtgcaacatttttggtaacatatgttttaccgcttttgacggatgatgtggagtctattagaggattaatagtgtttttaacaatgcttataatggttgttttattgttgacaaggtcgaatactttttatcaaaatccgatacttgcagcaatgaaatatagaacattttcttttaaatttttaaatccgtcaaatgatattacaaatccggaaagggtatatattggaattacttataaaaaaccaatagttgaagaagcagtaataaaacgtaaatatatttcagatggtgtatttgttatttataatgattag

SEQ ID NO: 95863 - DNA, 993 bp, Eubacterium plexicaudatum ASF492
atgtcagaggcaggcttgaatgaagaacaaattagaacaaagataaaagaattttgtgataatccagttcaaagtggattagaagcatatgttgtaaaaaaggattctcctaaactaaaaagaatgtcattatctgaagaagaaaatgaagagggaaagaattttagaacagtgcttaaagaaatgttttttgaaattctcgaagaaaaatttttatcacaggaatctgaatatgcagatggtcataaattagctgataatcagcacaaaattctgattttcgaacaaggagatagttttcatccgtttacatacatttctgatattgatgaatttgatgaatttgtaccagaagatttgattgatgcctccggtcttatgttctgcattagaaaaggaacagacgtgctttggatatatcagcatctttggagtattatggtaccaaataaaaagaaaactaatcctatggctcggattatgcgatttgaaaataagattgtatttgaggagcaacgtgaaaacctgctgacaatagcaaagaaaatagatattatagtaatgaataatcatttgattacaagtaatactactcttttacaaaaatattttggatttcaggattatgtttatcagacagcacaacagacaattcagtgtattgtacagaaaaatcttgtcgaaaacactgaaaagttaacagaatatattagtaggggtaaacctaaatacgctagaaagatgatgcgtatcggtttatcaaaagtttttgatttaacacaagagcaattgattaataaggttaatacattaccacgttggcagggaaaatttaattttaatcaagactcgaatcaaattgtgcttaacacttttagtgaagtagaaagtctaattgatttatttgatgagagatacacacgttctgatgtaactgatactgaatatgatacagatgttaaaacagtagctgaaccaacacaaatagattag

SEQ ID NO: 95864 - DNA, 558 bp, Acinetobacter ursingii ANC 3649
atgagtactcaacagaatgaatctctaggttttatacgtgtaatgatggtgttaagtagcttttcaccattatttatattgtgggctttaagaggaaataaagaggtatcagatctataccttatccctatctgtgctttatttgtcattattccaaatttatttttatggcaaagaattaccgttgctaagaaaaaaaatgacaaacgtacaattaaagttggtacagcagacgatcataaggatcatattttagtttatttgttcgccacacttctaccattttattctgtcagtattgatagtattcgagatgtgtggactacattagttgcattggcttttgttatttttctatttttacatttgaatcttcattacatgaatattgtctttgctcttaaagggtatcggatttttactatttgtccaccagaagataataatcctcttagtggtaaaactcctcaagttttaattacaaagagatcaattgtactaaaagatgatgaaattatggcatatcgattaagtaatacagtttttttggagatttag

SEQ ID NO: 95865 - DNA, 906 bp, Acinetobacter ursingii ANC 3649
gtggttatagactttgattttgacagagttacaaatattgagtttggggttggaagagagaatgaggatcaaagtcagcaattttttgaagctgtacctgtagatgaaggagtccaaaaagcattagttgaaatggttcagacaactattgttatcatgagaaaaaataatgataaacctgaattatatcaaccatcagaaaagcatgctggaattgaatatttatatctggctacttcagaccaactagctcaaacaatgaaaggattacatgaagctgctaatttgacaattaattccaatgttttgaatgatccttctgaaatattctgttatttcgcaaggtttacagatcagtcaggaaaaaaactgaccgctttgcgtagggcaattcagtttaagggtgttttgaaaaatcaacttattagatttttggatgatacgcttaaaattgttgaagaaaaagtttttaaattagatgctgactttgatttactgattgataattctaatattcacataatccgaccaagtgcatttgagtttgctggcaagttgcaggaagcaattttgcaggctgttccgatgaatattgcatcaatagcagcagatcttacctatgtagattttactagcttacaaagctacgccgaacatcgacctcgtgcagctagatacattgcatctattaagtctcaggctgaaactaaaaatattaacaaagatcgtttaaaactattatgtcagcatactggggtttcattagaagatcaaaatggaaaaatcatagtgaaagaagggtatgaattagcttttttagaggtattagatagacgtcgttatcgtttagagttaatcgaagggcaagctgaaaattttaaagcatcaagtagaagtaagttataa

SEQ ID NO: 95866 - DNA, 216 bp, Acinetobacter sp. NIPH 713
atggggattatctatattaagacagatttattttatgcaaatccatcgcttgcattactagggtttcatatctataaggcagatggtgagttcaaagcatctataggtaataaagaaaatataattcttataacacgcgaaaaacttgttgcggatactagggttaagtatataagattagatgatcgtatattttatgtacaaaaagtgaattag

SEQ ID NO: 95867 - DNA, 951 bp, Acinetobacter sp. NIPH 713
atgttaataaatgaattaaaagaaagtttgaatgaatttgtagagagtccgaacaatttcgtagcttgtgtgtacggagttttacaagatggagaaaatttcagtatcaaaaagcttgatattgccgcaactgaccaaccggcaataagggatatttatttaaaaagtactaaagagttgttgattgagaaatctgatttatcattgattaaattatcatcttgtgatgatcgaagagaagctatttacgaatatgatttagccttaccaccgaatattgctttccttgggggtctgaacttagatgatactcttccaaaatttaattttaatactgatgatctttctaaaattaaaggattaattattgagattggtaatgaaagtgatactttcatgatatacaaatcttttccgttaattcatttatttgggaggggctcattatatttgggtttaatgaaagaagaagaaagatttaagagaattgatcaaactttcttaagattgaccactggttttcaattattaatttatcaaagtactttgtatgtaatcgatcttagtttcctcgaaaaatcaacaagttttaaaggtataattaaagcggaagcagaaaaaggtatagaggctatagagagtttggggatcttggattctacagaacctttaaaagatatgatcgaagacttagccttttcaagaaaattaacgaaggtaataaatgattctcctgtcataaaagcaggtataacgaatgaacaaatcatacaatttattcagacacacgttaaacttaaaaaacaaataaaaatttctgatgatggaacaaaaattatattaacaagcaaagtatcgaaaaatgaatttttaagagttttactagatgatcatttatattcaaagctaacagacattccttatgtggcgaaagccaaagacgtcgcataa

SEQ ID NO: 95868 - DNA, 576 bp, Acinetobacter sp. NIPH 1847
atgatcaataaattaaaactttattttatatcacttgcactattatttatatttataatagtggtaactatagatattccattttgcttccaagatggttgtagttttattggttttaaattattattttttaaaaattggttttccttaatttgtttagtgtgtttctttataagtttatttttttggtttgattttaagtttaaactaaaaggatctactagtaacccatttaaagccaaaaaagttgagaatgttagttttgaacatttaactttccttgctacatatatagttccattaataagttttaattttgatagtgataaatttaagttattgtttactctattgatttttgttattggtattatttatttgaaaacaaatttattctatgctaatccatcattggcattaatggggtattcgatttataaggttgatgctgattttagggacggagctaaagagggaataattgttttgtcattaaataaaattgaaaaagattccttggttacttatattaaattagatgaaaatgtttattttgggagggttttaaatggatag

SEQ ID NO: 95869 - DNA, 948 bp, Acinetobacter sp. NIPH 1847
atggatagagaaacgcttgcagcgtatgttgatgcaattataaatgatataacttctacagcttctgtgtatgctataataagtgtaaataataattatgaaattagaagggttgatgttgaggcaaatcttcaaaatcaaattaaaaaattatttagtgagagcctgcaaggttcaattttatttaatgaagatacatctataaagaagttgacagaatgtgattcaagaaggaatgtaatatgtatggttgatactgatttaggagaacagtttagttgtatcaatcagttagatggcaaccatggggatgatttattgcattttaagcctaatgaggagctaaatagcttaaaaggtttaataattgatatcggtaatcagcaaagccaattacttatatataagcatatctatcctttggaaatattaaaaccaacaaggttagcgggtatgtttactactaatcgattagaaaaagttaataaagatttattaactattagcccctcataccaaatgataagagttgaaagtgagtcatatatttttgatattccatttgtagaacgtaatgcaaagttccaaatgattgtaaagtccaaagctacacaagcttgtcaaattatgagaaatgtagcatggatacacaatccaacagctatggatgaattagttgatgatattagctttgccagaaagttaagccgaataaccgctcaatctcctgttattaccaaagcaattccgagtgttaatattattgaattttgtaagaattttccttctattaaaggtaaaataagatttaatgatgatgaaacaaagattctactagatacaaaagtttctaaaaatttggtaataaaaatttttctggatgatatgttgaagtctgagctaacagaatcacattacgaaagtttggctaaagataacgtagattag

SEQ ID NO: 95870 - DNA, 558 bp, Acinetobacter sp. CIP 51.11
atgagtattcaacaaaatgagtcactaggttttatacgcgtaatgatggtgttaagtagtttttcaccattatttattttgtgggctttacgggggaatcaagaggtatctgatttatatttaattcccttttgtgttttatttgttattgttcctaatttgtttttatggcgaagaattaatattgccaagaaacaaaatgataaacgcataataaaggttggaactgcagatgatcataaggatcacattttagtctatttatttgctaccttattgcctttttattctgttggtatagagagcttaagagatatagggactacattagttgctttgatttttgtgattttcttgtttttgcacttaaatttacattacatgaatattttatttgcaatgaaaggctatcgtatttttacaatttgtccgcctgaagataataattctatcagtggtaaaatacctcaggtacttattacaaaaagagccatcgtgttaaatggcgatgaaatagaagcgtatagattaagtaatacagtttatttggagatttag

SEQ ID NO: 95871 - DNA, 906 bp, Acinetobacter sp. CIP 51.11
gtgtttgtagattttgactttgacaatattaagaatattgaatttggggtggggagagagtcagaagatcaaaatcaacagttttttgaggctattcctgtagatgtgagcgttcagaaagcattggttgagatggctaaggcaactgtcgaaatcatgaataaaagcagtcctagtcctgatttatatcaaccgtcagaaaagcatgctggtattgagtatttgtatttgccaatttctgatcaaatggcacaaacaatgaaagacttgcatgaagctaataacttagacatgaatgctaaagtattaaaaagccctactgaagttttctgctattttgcaagatttatagataaatctggtaaaaagctaacagctttacgcagagctattcagtttaagggaatattgaaaaataaacttattagcttatgtgatgacacattaaaaattgttgaggaaaaggtatttaaactggatgctgactttgattttctaatcgataattcgaatattcacataatccgaccgagtgcttttgaatttgctggtaagttacaagaagctattttacaggctgtgcctacaaacatttcatctattgcagctgatctcggttatgtcgattttactagcatacgggcttacgctgaaaaaaggcctcgtgcagctcggtatattgcatctattaaatcacaagctgaaactaagaatattgataaagatcgtttaaaactgttatgtgagcatacagcggtttctttaaatattcagaatgaaaaaatctttgtgaatgaagggcatgaactgggtttcttggaggttctggatcgacgtcgttaccgtttagagttaatcgacggtcaagttgaaaatttcaaagcatcgagcagaagtaagttataa

SEQ ID NO: 95872 - DNA, 639 bp, Clostridium clostridioforme 90A7
atgggggaacaaaacttaaagctgaaaaggaagcttgtcattcagtccttcctgccgctgttcattttaatttttatcagataccttgattacaggatgatatcatccatatgccacttcatccgtgaattaatgcagaggaatttcagtgtcatgaaccggatatgggaccatccatacctgggtccatttatcgctgctttcatttcactggtatgctccctttacggcataaccgccatgtggcagtttaagagcatgcagatgtccggatttgtggatgcaggagaagaaatcgtgattgaagaagagataacggattccggaatcacatttttcatgacctttgtgctgcctcttttgctggacgatgtggaaaccttaaggggcttcatcatttttaccggtattttagggctggtcatccgtttgatgtggaccacccatttatattatcaaaaccccatattgactctgttgggctacaggatatataaattccgcttcatcaatcctgtcatggacggctgccgggataaaaccatgattgcagtgtgcagaacaggcattgaagagaaaaaaatagtgaaatggaagtatatatcggatgatgtctgcctgatgtacaataaaaactga

SEQ ID NO: 95873 - DNA, 1008 bp, Clostridium clostridioforme 90A7
atggaaaacaaaagagaacacagcacgaaccatgctatcccaaaaacgtcaaaggaaataattgtaaattcattaacagaactgtttgcggatgatgaatttgggtttgatatgtttatcatgatgaaaaccgtggagccctccatgaagcatttcgccttttatgagggacccaccggcagggaacatgattttaagctcaaagtccaaaactccattgtcaagagtatcagagatttgtttcttgatgaggaggctgaatatgcaatggcagaagaggcagggggcaatcaaaatattttttacatcataaaacagaatgacgattataagccgtttgaacttctgaataccccggaaaagcaaatgggtcctttcttcatggatgacagggacaaggccgatgcaatactctttcgcttcagaaggggtgttcacagcatctgggcttaccagtatatacttcccgccaccatccccaataagaaaaaccagcacttttttgcccggatattagatacggaacagactgactgttttgtggaaatgccggaacagctctttgtaatcacaagaaaagtagatctgcttattatggatgacaaaatcatcaccaaagatataggcctgatgcaaagacatttcgggttcaatgacttcatcaaggcatcagccaaaaaagcggtgtctgatatttcagatatccgtctggtgaccaattgtgaaaaattaacggcatatatcgagcggaaccagactaaatattcccgcaaaatgatgcggattaaacattaccatgtggtggaaaagacagcggaggaactgatacagataatcaatacagtcccccgatggcagggagtatttgatatccgtgacggacagatttatctgaggacctttagggatgtggaaaatctgattgatttattcgatgaacgatatacggtttcgttggtgacgggggacgaatttgatacggatgtaaaaaggctggctgctccgtga

SEQ ID NO: 95874 - DNA, 639 bp, Clostridium bolteae 90B8
atgggggaacaaaacttaatactgaaaaggaagcttgtcattcagtccttcctgccgctgttcatttttatttttatcagatactttgattacaggatgatatcatccatatgccatttcatccgtgaattgatgcagaggaatttcagtgtcatgaaccggatatgggaccatccataccttggtccatttatcgctgcattcatttcactggcatgctccctttacggcataaccgccatgtggcagtttaagagcatgcagatgtccggatttgtggatgcaggcgaagaaatcgtgattgaagaagagataacggattccggaatcacatttttcatgacctttgtgctgcctcttttgctggacgatgtagaaaccttaaggggcttcatcatttttaccggtattttagggctggtcatccgtttgatgtggaccacccatttatattatcaaaaccccatattgactctgttgggctacaggatatataaattccgcttcctcaatcctgtcatggacggctgccgggataaaaccatgattgcagtgtgcagaacaggcattgcagagaaaaaaatagtgaaatggaagtatatatcggatgatgtctgcctgatgtacaataaaaactga

SEQ ID NO: 95875 - DNA, 1029 bp, Clostridium bolteae 90B8
atggaaaacaaaagagaacacagcacgaaccatgctaccccaaaaacgccaaaggaaataattgtaaattcattaacagaactgtttgcagatgatgaatttgggtttgatatgtttatcatgatgaaaaccggggatccccccatgaagcatttcgctttttatgagggacccactggcagggaacatgattttaagctcaaagtccaaaactccatcgtcaaaagtatcagagatctgtttcttgatgaggaggctgaatatgcaatggcggaacaggcagggggcaatcagaatattttttacatcataaaacagaatgacgattataagccgtttgaacttctgaataccccggaaaagcaaatgggtcctttcttcatggatgacagggacaaggccgatgcaatactcttccgcttcagaaggggcgttcacagcatctgggcttaccagtatatacttcccgccaccatccccaataagaaaaaccagcacttttttgcccggatattagatacggaacagactgattgttttgtggaaatgccggaacagctctttgtaatcacaagaaaagtagatctgctcgtcatggatgacaaaatcatcaccaaagatataggcctgatgcaaagacatttcgggttcaatgacttcatcaaggcatcagccaaaaaagcggtgtctgatatttcagatatccgtctggtgactaattgtgaaaaattaacggcatatatcgagcggaaccagactaaatattcccgcaagatgatgcggattaaacactaccatgtggtggaaaagacagcggaggaactgatacagataatcaatacagtcccccgctggcaggtagtatttgatatccgtgacggacagatttatctgaggacctttagggatgtggaaaacctgattgatttattcgatgaaagatatacggtttcgctggtgacgggggatgaatttgatacggatgtaaaaaggctggctgctccggggggaatgggaggggaggattaa

SEQ ID NO: 95876 - DNA, 639 bp, Clostridium bolteae 90B7
atgggggaacaaaacttactactgaaaaggaagcttgtcattcagtccttcctgccgctgttcatttttatttttatcagatactttgattacaggatgatatcatccatatgccatttcatccgtgaattgatgcagaggaatttcagtgtcatgaaccggatatgggaccatccataccttggtccatttatcgctgcattcatttcactggcatgctccctttacggcataaccgccatgtggcagtttaagagcatgcagatgtccggatttgtggatgcaggcgaagaaatcgtgattgaagaagagataacggattccggaatcacatttttcatgacctttgtgctgcctcttttgctggacgatgtggaaaccttaaggggcttcatcatttttaccggtattttagggctggtcatccgtttgatgtggaccacccatttatattatcaaaaccccatattgactctgttgggctacaggatatataaattccgcttcctcaatcctgtcatggacggctgccgggataaaaccatgattgcagtgtgcagaacaggcattgcagagaaaaaaatagtgaaatggaaatatatatcggatgatgtctgcctgatgtacaataaaaactga

SEQ ID NO: 95877 - DNA, 1029 bp, Clostridium bolteae 90B7; identical to SEQ ID NO: 95605

SEQ ID NO: 95878 - DNA, 639 bp, Clostridium bolteae 90B3
atgggggaacaaaacttaaagctgaaaaggaagcttgtcattcagtccttcctgccgctgttcattttaatttttatcagatactttgattacaggatgatatcatccatatgccacttcatccgtgaattaatgcagaggaatttcagtgtcatgaaccggatatgggaccatccatacctgggtccatttatcgctgctttcatttcactggtatgctccctttacggcataaccgccatgtggcagtttaagagcatgcagatgtccggatttgtggatgcaggagaagaaatcgtgattgaagaagagataacggattccggaatcacatttttcatgacctttgtgctgcctcttttgctggacgatgtggaaaccttaaggggcttcatcatttttaccggtattttagggctggtcatccgtttgatgtggaccacccatttatattatcaaaaccccatattgactctgttgggctacaggatatataaattccgcttcatcaatcctgtcatggacggctgtcgggataaaaccatgattgcagtgtgcagaacaggcattgaagagaaaaaaatagtgaaatggaagtatatatcggatgatgtctgcctgatgtacaataaaaactga

SEQ ID NO: 95879 - DNA, 1008 bp, Clostridium bolteae 90B3
atggaaaacaaaaaagaacacagcacgaaccatgctatcccaaaaacgccaaaggaaataattgtaaattcattaacagaactgtttgcggatgatgaatttgggtttgatatgtttatcatgatgaaaaccgtggagccctccatgaagcatttcgccttttatgagggacccaccggcagggaacatgattttaagctcaaagtccaaaactccatcgtcaagagtatcagagatttgtttcttgatgaggaggctgaatatgcaatggcagaagaggcagggggcaatcaaaatattttttacatcataaaacagaatgacgattataagccgtttgaacttctgaataccccggaaaagcaaatgggtcctttcttcatggatgacagggacaaggccgatgcaatactcttccgcttcagaaggggcgttcacagcatctgggcttaccagtatatacttcccgccaccatccccaataagaaaaaccagcacttttttgcccggatattagatacggaacagactgattgttttgtggaaatgccggaacagctctttgtaatcacaagaaaagtagatctgcttattatggatgacaaaatcatcaccaaagatataggcctgatgcaaagacatttcgggttcaatgacttcatcaaggcatcagccaaaaaagcggtgtctgatatttcagatatccgtctggtgaccaattgtgaaaaattaacggcatatatcgagcggaaccagactaaatattcccgcaaaatgatgcggattaaacattaccatgtggtggaaaagacagcggaggaactgatacagataatcaatacagtcccccgatggcagggagtatttgatatccgtggcggacagatttatctaaggacctttagggatgtggaaaatctgattgatttattcgatgaacgatatacggtttcgttggtgacgggggacgaatttgatacggatgtaaaaaggctggctgctccgtga

SEQ ID NO: 95880 - DNA, 639 bp, Clostridium bolteae 90A9; identical to SEQ ID NO: 95878

SEQ ID NO: 95881 - DNA, 1008 bp, Clostridium bolteae 90A9; identical to SEQ ID NO: 95879

SEQ ID NO: 95882 - DNA, 639 bp, Clostridium bolteae 90A5; identical to SEQ ID NO: 95876

SEQ ID NO: 95883 - DNA, 1029 bp, Clostridium bolteae 90A5; identical to SEQ ID NO: 95605

SEQ ID NO: 95884 - DNA, 570 bp, Enterococcus faecalis ATCC 6055
atgttaagtttatcggaaaaatggaaactatacatatcttcctatcttcctctctactttttactgctagtcaaggagtacaaacatgtaatagctgtatttactcattttaatactagtggatgggcaagtttatttgtgtgtattatgatagctacatttctttattcaatttatcttatcagaaaaatattttttggaaaacctataaaaacatttaatattagcggtgaatttgaacaagttgcagataatgttatgagttatgttatgacttatatagttcctgttatatctgtagatttttcagaaccagtaacattattaactaatattttactgtttatttttattggtatagtttatgtgaaaaatgatttaatatatttgaaccctgtaattagcgttagccataatatttatatcaatgaaaaagatattgtgatatcaaaatacagtttgggggaactgcaaagatttaataaagaacatattagaatggtagggaaaaagttatctagtaatgtaattttgtatcaagaaataaaaagcgaagataagaataattga

SEQ ID NO: 95885 - DNA, 945 bp, Enterococcus faecalis ATCC 6055
atggatttgaataagttgtataattatagtaaatcgctaattgatgatggcgaagttgccacaaatgtagatttatttttattgaggaaatctaaagatgacgatataattgttttctcaatggatgtagataataatttgcaaaaagatttgctaaaaacatttgttgattattttaagaggtctgagaaaagaaattatccacagaatgattacgatgttgttacatctggtaaatttgataaagaatattataaaacatatacaaccgaatatacaggagtgaaaagatttatagaatcttttaaagatggatttattgataatataaaagggctaaacgaaacatccttttttgcatatgctgtaaaagtacatatggaaaaggagtggtttatttttatcgctccctttgcaaaagtatctaaaatctctgctaccaaagttctaggtaatttgaaagataacagattaactagacttgataatcaagatactgtgggctttagttcatctatttctatgatatttgaagagaaagagttacttatgaccaataatttacgaatattcgaaaaatgttgtggtatgaaagaagaattccaaaaaagagcaaaatcgattttaaataatatatctacatttgattcgattgaagaacttgatgaattaatgaaaacgatagaatctgatagtgttgtagcaaaaagattaactaaaatggaccagaattacgatagagtatcctcgtttttcaaaaacaaaactagagttagcgaagtattaaaagatgatgccttcaaagataaatttaaagagattaaatatgaaaatggtaaattaaagtttgagaagaaacataggcatatattcataacattaatatctgatgcatgttatgaaactatagtaggtaaaacaaaaggaattgattttggattctag

SEQ ID NO: 95886 - DNA, 510 bp, Aeromonas hydrophila ML09-119
atgaggaattggttaaaaactttgttatttgtatcgtctttctcaccaacccttctagttctggcaggcgttagatattactctgttggcacctttgattctttggttgttcagctatcagtcatatcgatggctggaatattgttaccctttctaatattagagctagtcaaaaaagaggctcaaagagagagtttttctgcaaaaaaagtggagtcggcggattattacctattggtatttctagccagttatgcatccccagtagtcatgaaaatcgctgaaattaatttttttatggctgttatgacgatcagccttatattcgttgttgcatggtttgtttctaatattccgtcacatccaattctttatctgttcaaatttaggttctataaaatagagtcgaatgatggaatggtttacacattgataaccaaaagagttatcaggagccctcgtgacgtaacgagagttatgaagctgtcaagtactatgataatggagtag

SEQ ID NO: 95887 - DNA, 888 bp, Aeromonas hydrophila ML09-119
atgtctttaagtctttttgctctgacaaacgacccagctcgtcggatagttaagtttgaattatcacacccagttcaaatagagcttactgattatattaaaagtcaggaggaaacttttgatgaggttgtagatgaatttgagtttgacgggaagtacaagccggatgtcggggagattttatatatcaataattacgatgacattgatggtcttgcacaagctatcgaaacccccttgggagtggaaccagtagatccgagtgaagactttttccttatcataaaagcgctgtttactggttaccaaaaaccaaatggttctgtaaagatattgcttcagaattttgatagaagaaaaatcatttcaactaatggtctttctatttttcatgcaaataatgtttataagaaaatagaaggaattgggctcactgtcgatcataaacttactgcaacgctggaggatggtaaattaaagttttacagctttcattcgacgcgacaaatgttcgatcttagtgagtattacaaagaagctacggatgctgatgtagttgaatttcttcaaattgacgtaatgcagtctgtggactccgacgagtttatagccctcgcggactcatgggtgagaagaaagatatccttagttcaacaaagtggaattctacaaaatgttccacttcatgaaataaaagcagttgctaccgagtttggaataccattaactactgtcgatgaaaatggcactgaagtaatatgtgtccctgataataagtcggatcttaaaaaacttctcagattccttgatgaagactattacaaatcaccactatcaaaaacccactttgtcactagctccaagcgagtcgtgaaggcgcaagcctag

SEQ ID NO: 95888 - DNA, 567 bp, Firmicutes bacterium M10-2
atgtctaaacttgtgtcaagttgcctttacttcacctcatttttaccgttgtggatttcaattcttttcattgatattaaaagccgctttgagagtcctgaaaatctatggacagagagaataagtatttgcgttatttccttagcaagtattatttccttcatagtattgcaatctgcatttgctcataattcaaaggaaggaagcacaaagcttatggtaaaggatgttgcagatgataaaacaatatcatctgaatatttattatcatacatacttcctttgtttgcttttgattttacaaaatgggatcaggtagtgttatttctcatcttttttgtaatgctaggctttttatgtattagccataaccactttagtgccaatatatgtttggaaatactaaattacaagatgtttacttgtgaacttgaggatgaagataaaaatgttattcaatggaaaataattagtcatagaacgctgaccacccataagggagaatacatatatctaaaatcgctgaataatgaaatcaaactagatataaatgaaaaaaaacaatag

SEQ ID NO: 95889 - DNA, 930 bp, Firmicutes bacterium M10-2
atgtcaatagacaaaataaaaagtatatttgaaaaagtagcaacctgcgaagcttgctcgttacaacttttgcaaattaagaattcaaagagaaatggaactacatattgtgggcgagaaattacattatctccagaaggtactcttacgaattttttgtctgagatttctgacagatattgctctcaagaaaaaggattagaaaaaatgtttgagagcgtaactgattatgacggatctactgtggataaaacgatttataaattgactaccgacaatgagttgatttcaacagaatgttcagcattaattaaagcaattggaaatcctgattctgaggttgaccctcttgaattttctgcacgagcatatattcttaaaggcgtgattcctatcgatggagaagaattatcagtaaaactgatttccatgcaaaatcctgttacatcattaaaacacaagtttttgcgttctaatggaacatttacagaaatttctgataaggtcatctccctgagaccagccattgatgttgtaattgttgatgaaattgtttatatgctcacacttgccggagagaatttatttaatatggagagagcttataaggctgtttgcaaaaaacaaatcactaatatcacaaattcaaacataattaatgatgctgaagcgtttagcggtgttgcaagttgtagacacaatccgagaaaatttatttcatttaacgaatcacgtttgcaaaagctgaagaatgtagatagtagaaagaaaatgagcaagaaatttaatattcctctggatggggataaatttgatatgagccagccgggagcagctgataagcttattaagctattatgtgacaggggtatggttgacccatttgatgacaatcctatggaagtatcaagctcaaaaaaatgggaataa

SEQ ID NO: 95890 - DNA, 594 bp, Escherichia coli KTE61
atggatagcaggccatatcttaaaacagtactatatatactatcactatggcttctatttttatcattattaattatgtcctacgataaggttttgataaaaaatgtgtgggactatatttttactgaaaactttactttctcaatctcgtcattgaaagtgagaaatatcgttttcatagttagtttgattttcatttttattggtgcaattattttaatagtccttgcaaatagctttggttcgggttggtctgttgcatgcactgtctcggatattagcaatgaaaaccatgaacatttagagtttttaaccacttatataatgcccttagttttcactgatgtcgatagtaagagaactgtattaaatttagggttgatgatatttgtaatcggcgcaatatacgtaaagacaaaccggttttattctaacccatcacttgcaatactcggattcagaatatacaaagctaatgttcatgaccgtggagtgaaaaaatgcacagtaatctgccgcagtgttctaaagagtacagataatataaagtatataaaaatcgacgatgaaacttatttggctaaaatagtgtag

SEQ ID NO: 95891 - DNA, 972 bp, Escherichia coli KTE61
atgttcactaacattgaaaatattttaaaatcgaaacgcatctctggtgaagctttttttgttgctgatgttcaaggtacgatagatatatttaaggttaaccttgaacctgatgctgaaaaagatctgaccacttcattttctaaaagcttaatcaataatattattgaacctaacagaggtaaagtggcagttccacttgtatccactttattagaaagagataagcaagttttcgaatatgatcacttaacaattaatcacctcccaattgaatttactaaaatgaacaacgtgctaaatttcggtgtcaatgggaatgcaacacagtttgattttgcaacacaaagcctcacatcggtaaaagccgtaatttaccacctttgtgatggtaatggaaacagcgtagtcatttaccaacataaatatcctgtttctctacataagaaaacaaaaaaatctttcttgagtctaaatggcagaaccttagataagatcactcatgacagtattgatataaatgacactattgacttcttcttttttcagaataagtactatgcgctaaacattaagcttcttgaaagaatgtatggattagaaagtgtaatagataatcttgcaaataactcaacgccattaataataaaccttggaattgttaatacacaaggtatgccagtgccactagatattttcaaggatatgtataaagacagagcatttatgcgtagacttgctatggtttcaaaagggaacttagtaaaaacgggagtttcagtccctcaaatacaacaagttatgcaaaaattccctgtatttcaacggaatattgatctaacaggaggattaataaaccttaatactaaagatcaaaagagatattttatccgacttctaaataatgaagcatcttttgcagcacttgataactcgcccttcctggctgttgaaaaagactccgctgcataa

SEQ ID NO: 95892 - DNA, 519 bp, Escherichia coli KTE102; identical to SEQ ID NO: 95748

SEQ ID NO: 95893 - DNA, 885 bp, Escherichia coli KTE102; identical to SEQ ID NO: 95749

SEQ ID NO: 95894 - DNA, 444 bp, Klebsiella pneumoniae DMC0526
atgaaaaacaagccatggcttatttggtggtcgttagggatctgtcttgctagttttatatcagttatttttttcctacactatgcaaataaaaacctcccttctctttataagaatgttgagaccatatctcctgcaaataaagaggttaccaattatttcttgagttatctattccctttattagggacagattcaatcgccgataaatggcaatatgcagtatttttctatatatctcttatcgtttatatatgtttctctgagaactataatttcaaccctcttatctccgctttaggatttaaattttatgaagcagaagacgatactggcgttggatttgtgttgatatccaaagaagttattacaaatttaaaaaacagagattttgaagttattcaacttacagactacacatttatgcatgtaacaaggaaataa

SEQ ID NO: 95895 - DNA, 870 bp, Klebsiella pneumoniae DMC0526
atgagcctttttgcaatgatgaataaaaactctgctgtgaaagtgtatcgtattgataccgacagacaaacagacatcaaaatcaaaaaaatatttgatgaccaattatctctttttgaaagtcatcacaatacggaacttgttttcgaagccggatatacccctagctataatgaatgtagttatatagataactttgatgaaggaaaaatacttcttgatgcagttcagcgtagcaccgcaatgcctttgtggacaaaaaatgttgggcttaatgatataacagctttttttatggctcctgcgtatcctcaagtgaaagacaaaatagcaatccaaaccttttcaaaaaaacagatacttaacgagtcaagatacttatggctcagtaaaaattcatttacgatgtcagatcttttgggtttcaatctagacgataaattagttgcaatccttgaaggagataaaataaagttcaggaacttcaacaacctgagaagcatatttgatatgagttcttattttgctgaagcaacaaagcaagagatttctgactttgtaaaccaaccagtttttaatataccagtggggtttgatcttccagcccttgcagataacgtcataagaaaaaaagtcacattaataaacaaatctaaaatattggtaaatcatactgtaaccgaaataaaaaacgcagcgctaactttgaacttccctataaaaacgaccggctcaggaagctccgagaaaatagaaatgccaacaaataaaaaagaaataaaagagttacttaacttcttggatgaagactatttcaactctgaaataactaagcaaaggtttcgatcaaattcaaaacgtaaagcataa

SEQ ID NO: 95896 - DNA, 606 bp, Enterococcus faecium UC7267
gtgagaacgatacagaaattccttttttatatgtcttcattcatgcctctttatttgctgttatgtgtgcaaaatattaaggtatttgataaaaataagaagttttcatctgatatattttgtagtcaatttaacttctccaatattccacaatctattttttggtggggcttaatagtttttgtttttatttctctctttggatgtatattgtttttttttatttatacaaaaaaagatggtattatttccaaattagaagatgctgaatttgttagggaagatacgatgggatatattgtaacttatattgttccactgattacgatggatatttacagtcccagaagcttgatcgttaattttgttttatttatagttataggaactttttatgttaagaacgatcaaatatttatgaacccagtatataatctttttagttacaatgttttttcaaccgaaaaaggcatttatattactaaaatatctaaacaaaaattacggtctatatctaaacatggattagaggtaagaaaagtaaatattttagcagatatttatgtgttaaaagaggcagataataaaccaataagtcagttttaa

SEQ ID NO: 95897 - DNA, 909 bp, Enterococcus faecium UC7267
atgaatattgatgagattagaagattcatgcgtgatctagatactgccaatactgatagtataacaatgaaagtggtacaaaaagttggtaatggtattgatatctataccccggaaattattgtaggtatgcgagaaaacttaaaaaatttcttttgtgagagtttagacaataaatttttcgatttagagcaaagggtttatgatccgagtgttgtagttgaaggtactttacaaatctctgatttagcaacggctcatataaatgatgtgttagcagacctgagaaatagcgataactatgttggagatgtcaaagatatagatattgagcgtgtaaactattatgtttttgaattttctaataacgggaggaatttgttaatctttagaagatttactaaaatgaaaaaaattagaaatggtttattgggacattttgtagataacacttttagaaaaattgaaacagatgatttttttggaatcgatagagatatagatataatgatttttgataatcaagctttgatagttaataggttcgcattgcaaacaatttttaaactaaacgattattttaaccagcaagcgcaaatagcattaaaaaaaatttctgatgtgcatgtcataagcaactttgatgaattttgtgaggattgtcttaatgataaacttgctgcaagaagaatgactaagattttgaatacacctggtagattaagtggtttttttaatcatttagaacatttaccaaaagttattgagcacttcgatttggatataatttttgagaataaccaaattacttataatttaaatagggattctaggaaccatatattaggatgtatctccgatggatattatcaatcattaattcaacaaagatatggggaggaactctag

SEQ ID NO: 95898 - DNA, 636 bp, Pseudomonas plecoglossicida NB2011
atgcagagcagtagggacagacgacacggactaacgcgattgggaaggctaacccttttcctagtgtcttatattccgttgtttttgataattatttttcagcaattctataaaaacagcgactatcttagttttggaggctttcatagcgatgcctggatgaatttcgcaaagaaattcggtgtggctaccacgcttataataatctcgattttggctattatttttttgatagtcctgctccaaaatctcgtggagagagctgaggaaagcggcgaaatttccaaggtggtggacgtagaaaataaaaactccgaatcaattgcctatctatttacgtatattatccccttcgtattccaagacccctctgatcctgcccagctaattccaataatcactttgatgtgcgttacgtatacgatttacgtcaactcatcaatgatacttattaatccaacgttgagtttttggtattctctctatcacgtagaggtcgaaagtatagcaggatcaaagaagagaataataattctaacgaaagaaaagttcatggaggagggggatttgctcaaaatgaagcgaattgcccacagattgtatttcggtatagatttggggaggaaggatgagtaa

SEQ ID NO: 95899 - DNA, 1011 bp, Pseudomonas plecoglossicida NB2011
atgagtaatgaagcgttgagtgtcgttcggagtttaataagccagcaaggtctttcgtttgaggtatttttcatacagcgaaaagctaagattgaaaataagagaaaagggtttagctatactcttagtaggttggatgcgtccaaagaaatcaatgagttctttctcaagtccgcaaaggcacaagtcgagaaatacatagagtcttcggcagtggctcagaaatattctgtcatttccgatgacatgccaaaaacgctgtttaagtatgatgaggccgaaaagctaaaggtttcagatcatacctggaagaaaattctcaacggcacggaaataaaatccgccgtttccttaagtgagcttaaaaagaatatttggtgctactgcgttaagattgtaagcacgactgatggtggaaaggcaaaagcattatttttcaaaaagctaacggctacaagcgttgctacagacgcgccgcaaggatttgggaagaaaattaaagctcacttcgactccacagaccctaagttggtggaaattaagactgagcacattacttttgaagataaatttgattgcgttctgcaagataattcgtttctgattttctctaaaaccgcattcgaaaaaattgctgaactagaagatgagtttgttgagctctcaaatgaaactctagagataataagtaatcattctgtggtagaagggttggagattgtccgggcagaagtcatatcaaaaccctctatgatgcgaaccctggcgaatatcgctaaaaataacaaccatgcccaaatcggtgctgccgaaattgagaatatgaagcagatgcttcttcagtatgaagggcgagagttgaagtctacttcagatggaagagttcttatcgaaaacaaggatgatgtagaggattttttgaagctgctcaatgactattacaaacaaggtatggttacaggtaagacatacggatcaaattctggaagtgtattggttaaaaagagttga

SEQ ID NO: 95900 - DNA, 573 bp, Acinetobacter baumannii NIPH 410
atgggactaaaaatttggctgtatctactctctttatggttgctgtttatatttgtgttttttattacattaaaaatgccagtatgcgtgagcaattgtgattatgttgggattagacagtttgtttttagtaatatcgttcctcttttttgtttaatactactgatactcggggtagttggatattttttatttgattttaaggtaaaaggtagtcatgaacttccatttactatttctgatgttgaatcaattaactatgaacatttaaccttcttggcaacttatattattccattaataagtatcgattttgataaaacgaaagcaccttatattttctttggtctaattgtagttatgggggctatctatgttagaactgatctcttctacgccaatccatctttggcattattaggatttaaaatatataaagttaatggggcattcagaaacaatgaaaataggaatgccatcatattaataacgaaaggtaatcttaaagatggtatgagagtgagctacatcaaacttgatgatcgtatttactttgttgaggagaaagtttaa

SEQ ID NO: 95901 - DNA, 987 bp, Acinetobacter baumannii NIPH 410
atggctgtcactatgggtatttttaaggaagatttaaagagtttttctgaggaacaaggggttactgctattgtttatgctttattaaaagatggtcagttaaaaaagctagatattgaaaataaagcgttagatgaccttaaaaatattttcttaaattatattcacgatgagattttattaaatgatgaaatgcatcttttaacgctatcttctgctgatgagagaggaaatgtgatttatgagtatgacttagattttccagaagattttaattgtattaaccaagtttcagatgataaatttccaaaacctgtatttaataattctaaagatgatttaggtaatatcgaggctttggtagttgagataggcaatgaaaaaagacaaattgtactatataaaacaatggctaatattaatgtttttagacaaaagtcatttatcttaggtgctgtcaagactgatagatttgaaagaattgataaagatcttttaagagtaagcccaaatttccagtttattaaaacaaatctgggtttttttgtgctagagctaaaaactttagaaaaattatttagctttcatactgtaataaagaaggaagcaactaaaagctgttcggctatacaagatcgttcaatattagagaatcctgagactttgattgagctgattgaagatataaaatttgcaagaaaattggttaaaatttataaatcctctcctgttttattacattcaattcctaattctgaaatcattaaattttgtgagcactatccgtcattgaaggggcgagtgagatttaatgaagccaaaaataaaatactactagatacaaaagtctccaaagagctatttattaaagttcttatggatgattatttgacttctgagcttacaaaattacattacgatactttggctaagaatgagtttgtagagttaccagaggaaagttcagatttgctcaaaagtgaataa

SEQ ID NO: 95902 - DNA, 444 bp, Klebsiella pneumoniae UHKPC59; identical to SEQ ID NO: 95894

SEQ ID NO: 95903 - DNA, 870 bp, Klebsiella pneumoniae UHKPC59; identical to SEQ ID NO: 95895

SEQ ID NO: 95904 - DNA, 444 bp, Klebsiella pneumoniae DMC1316; identical to SEQ ID NO: 95894

SEQ ID NO: 95905 - DNA, 870 bp, Klebsiella pneumoniae DMC1316; identical to SEQ ID NO: 95895

SEQ ID NO: 95906 - DNA, 522 bp, Klebsiella pneumoniae DMC1097; identical to SEQ ID NO: 95728

SEQ ID NO: 95907 - DNA, 870 bp, Klebsiella pneumoniae DMC1097; identical to SEQ ID NO: 95895

SEQ ID NO: 95908 - DNA, 234 bp, Salmonella enterica
  subsp. enterica serovar Typhimurium var. 5- str. CFSAN001921
atgctgaatcttttgatcatgatagtagctatagggatgatttatgtaaaaacaaatcgtttttattctaatccatcgttagcattgcttggatttagaattttcaaagctaatataaatgatagaggaaccaaagaatttgtaatcatttgccatggcgaaattgataacaacagcagaataaaatatatcaaactagataacaatacatgtcttgctaaaatcactcaataa

SEQ ID NO: 95909 - DNA, 978 bp, Salmonella enterica; identical to SEQ ID NO: 95651
  subsp. enterica serovar Typhimurium var. 5- str. CFSAN001921

SEQ ID NO: 95910 - DNA, 639 bp, Clostridium bolteae CAG:59
atgggggaacaaaacttaaagctgaaaaggaagcttgtcattcagtccttcctgccgctgttcattttaatttttatcagatactttgattacaggatgatatcatccatatgccacttcatccgtgaattaatgcagaggaatttcagtgtcatgaaccggatatgggaccatccatacctgggtccatttatcgctgctttcatttcactggtatgctccctttacggcataaccgccatgtggcagtttaagagcatgcagatgtccggatttgtggatgcaggagaagaaatcgtgattgaagaagagataacggattccggaatcacatttttcatgacctttgtgctgcctcttttgctggacgatgtggaaaccttaaggggcttcatcatttttaccggtattttagggctggtcatccgtttgatgtggaccacccatttatattatcaaaaccccatattgactctgttgggctacaggatatataaattccgcttcatcaatcctgtcatggacggctgccgggataaaaccatgattgcagtgtgcagaacaggcattgaagagaaaaaaatagtgaaatggaagtatatatcggatgatgtctgcctgatgtacaataaaaactga

SEQ ID NO: 95911 - DNA, 1008 bp, Clostridium bolteae CAG:59
atggaaaacaaaagagaacacagcacgaaccatgctatcccaaaaacgccaaaggaaataattgtaaattcattaacagaactgtttgcggatgatgaatttgggtttgatatgtttatcatgatgaaaaccgtggagccctccatgaagcatttcgccttttatgagggacccaccggcagggaacatgattttaagctcaaagtccaaaactccatcgtcaagagtatcagagatttgtttcttgatgaggaggctgaatatgcaatggcagaagaggcagggggcaatcaaaatattttttacatcataaaacagaatgacgattataagccgtttgaacttctgaataccccggaaaagcaaatgggtcctttcttcatggatgacagggacaaggccgatgcaatactcttccgcttcagaaggggcgttcacagcatctgggcttaccagtatatacttcccgccaccatccccaataagaaaaaccagcacttttttgcccggatattagatacggaacagactgattgttttgtggaaatgccggaacagctctttgtaatcacaagaaaagtagatctgcttattatggatgacaaaatcatcaccaaagatataggcctgatgcaaagacatttcgggttcaatgacttcatcaaggcatcagccaaaaaagcggtgtctgatatttcagatatccgtctggtgaccaattgtgaaaaattaacggcatatatcgagcggaaccagactaaatattcccgcaaaatgatgcggattaaacattaccatgtggtggaaaagacagcggaggaactgatacagataatcaatacagtcccccgatggcagggagtatttgatatccgtgacggacagatttatctgaggacctttagggatgtggaaaatctgattgatttattcgatgaacgatatacggtttcgttggtgacgggggacgaatttgatacggatgtaaaaaggctggctgctccgtga

SEQ ID NO: 95912 - DNA, 573 bp, Klebsiella variicola CAG:634
atgaccacggacttcatgtatactggttttttatacagttatggtgggtggtgtatgcttaatggatttgctcgttatgctttgactgctagttcggttgccccagtttgcctgacattggcattcttagcttatattaatgataattataagattcttgtttcctcaattcttttggctgtcgtaagtgtagttttttgtgtctttataatcaaacaagcacaaaaatataatccggtcacattgaaaaacttagaatcggcatctccggcagataaggaaataactaactatttcttgacttacttatttccacttatatctgggccgaccacttttatggattggcgattagccctgtttttttatctaagtcttttcttctacataaagcactcgtcttcgtatagtttcaatccaattttgtctattatatttggattcaagttttatgaagccgaagatgatactggggtgagctttgttcttttgtcaacaaaacctcttaccaatgcgaagatcaaaggtttgaaggtgaaaaagcttactgaacatacctatatgattgtataa

SEQ ID NO: 95913 - DNA, 894 bp, Klebsiella variicola CAG:634
atggaactttttgcgatcacagacagcgaaataccgactagaataattaagattgacatagatgctcccgcacaaacggtagtggaaaatctatttagaactcagagaagtgagtttataaatgaagatatcgaagagatagagttttgtgcatcttataatgttcaggatggtgaaatattttccatcaatccatttgatgacgaaataggcattattaatgcaatcgaacggcctgatgctgttccggtttgggaccccgatgatgtgtcagttcattatttcaaagcgttatttacgggtgaaccagcttcgaatggtaatcctactcaggtttggcttcaatgtttcgacagacgacaaataattaataatgaaaaatcctttttccaagtagtaactcagcctggaaatagattctcagtgtccactcgtcctggtttttcgcttagtgatcgattaactgctattcttgtgggtgataaattattgttcaagagtttctttatgctccggcgattttttaacatggaagagtattttaatgaagctactagagaggatttagacaactttatcggtaatgatatatttcatgtggaaaatgctgaagattttatgacatttgcagattctgcaattaaaaagaaagtatctttgataataagttctggaatactgaacgatcagcctattgaaaatctaattgagtgtgcccagaagattggatatcaattaggtataactaatgtgaatggtgacaataaaatcactatgccaaactctaaaagagaagtgaagcaactattatatttcctcgatcagggctactttaattcaataatcacaaatgagttaatgttgacgaattcgaagcgaccaataagaatttga

SEQ ID NO: 95914 - DNA, 567 bp, Clostridium bartlettii CAG:1329
atgaatagattaaattttcttaatatgcgcataagaatgttcatttcatcatattttcctctatacgtaattttattgattttatatagagataaaatattatcaataatacattatacaaatattattacttctatttttataataacactagtagccttatgtataatttctatttttgtatgtataaacttaaaaagaacaaagggcaatgaaaatcatatatttaatgaaatacaaaaaacagaagatacaattataagttatatgatgacatatatagtacctatattatctatagatttacaagattctaataccctaataatgaatattattttatatatcttaataggatttatgtatgtaagactaagtttaatttatttaaacccactttttttgatgtgtggttattatatatacaaatctgaaaatgaagcggttattattagcaatatatcatatatagaattacgctccttaaatggttttcgtcttaaatcaacttcattaggtaataatatctatctagttcaaaaatctgataatataggtttattataa

SEQ ID NO: 95915 - DNA, 495 bp, Clostridium bartlettii CAG:1329
atgggaagtataagcaataatcgttttaaaaaattaaataaatcattattaggaatagatggagatgtagatctaattatagaagaaaatgatgttttaatcttaaaccatatttcccttgaacgaattttctctatctcagaccattaccaagaaaaagctcaagaagctataaatttaatacatagtgcgaatagaattattaattttgaacaattctcagaagatgcaataaatgatggaagaattataagaactttgactaaaatgttaaaagaagaagataggttatctagatgttttgagaattttaataatgttgtaaatgtaattgacctttttgacttagatataaatatacaaaactcaaatggtgtagatatgattgtgtatgaagataaaaatcagttaatggatataataagactagttagagattcatactatactagtcttattaatgaaagacagggtatagatgatacattagtttaa

SEQ ID NO: 95916 - DNA, 639 bp, Clostridium clostridioforme CAG:132
atgggggaacaaaacttaaagctgaaaaggaagcttgtcattcagtccttccttccgctgtttattttaattttcataaaatattctgactacaggatgatatccggcatatgccatttcatccgttctttgatgcagggggaattcagtgtcataaaccggatatggaaccacccgtacctgggtccgtttgccgtcactatcgcttcattggcatgctccctttacagcataaccgccatgtgccagtttaagagcatgcagatgtccggatttgtggatgcaggcgaaaaagtcgtgattgaagaagagataacggattccggaatcacgtttttcatgacttttgtgctgcctcttttgctggatgacgtggagaccttaaaggggttcatcatttttaccggtattttagggctggtcatccgcttgatgtggaccacccatctgtattatcagaaccctatactgaccctgttgggttacaggatatacaaattccacttcatcaatcctgtcatagacggctgtaaggataaaaccatgattgcagtgtgcaaaacaggcattgcagaggaaaaaatagtgaaatggaagtatatatcggatgatgtctgcctgatgtacaataaaaactga

SEQ ID NO: 95917 - DNA, 1053 bp, Clostridium clostridioforme CAG:132
atggaaaaccaaagagaacatagagaacatggtaagaaagatgttgccgaaaaaacgtcaaaggaaataattgtaaattcattggcggaactgtttgcggatgatgaatttggatttgatatgttcattatgatgaaaaccaggaatccgcctattaagcatttcaccttttatgagggccctaccggcagggaaaacgattttaagcataaagtccaaaactccatcgtcaagagtatcagggaactgtatcttgatgatgaggcagaatatgcaatggctgaacaagcggggggcaatcagaatattttttatatcataaagcaggatgacgattacaaaccgtttgagcttttaaataccccggaagaacagatggggcctttctgcatggacgacagggacaaggccgatgccatactcttccgcttcagaaggggccttcacagtatctgggcctaccagtatatacttcccgccacaatccccaataagaaaaaccagcacttttttgcccggatattagatacggaacagaccgattgttttgtggaaatgccggaacagctctttgtaatcacaagaaaagtagacctgctcatcataggggacacaatcgtcaccaaagatatcggcctgatgcagagacatttcgggttcaatgacttcatcaaggcatcggccaaaaaggcggtgtctgatatttcagatatccgtctggtgatcaactgtgaaaaattaacggcctatattgagcggaaccagaccaaatattcccgcaagatgatgcggattaagcattaccatgtggtggaaaagacagcggaagaactgatacagagggtgaatacagtcccccgctggcagggggtatttgatatacgcggcggacaaatttatctgcacaccttcagggacgtggaaaacctgattgatttattcgatgaaagatatacggtttcattggtgacaggggatgaatttgatacggatgtgaagcggctggttgttccgggcggtaaagacggggagggtctaaaaaggcagggttga

SEQ ID NO: 95918 - DNA, 534 bp, Coprobacillus sp. CAG:826
atgagcaagttaatgaaaatgcttttgacgtttacatcttgggccatgctattttttatctatagttttacttttcttctagatggactatggacgaaaaagatagcaaataactgcactataggtattattttatttatttttggtattatattaacgttgctattttatgcgataataaaaagtgctaaaaagaaattagaaaaacacagcataattattaaaaacatatcaaacgcagatcctaatttgatagatgatattggaacatatttattgcctcttttaactatttctataagtgatgtaaattttagtgtattgcttactatgtttttagtaattttgttggtagtttggttgacaagagccaccttaaaaaatcccttgtttattttttttggctataggcaatttgatatctataacgaaaatggcagaatgtataagcttataacaaaaactaaaaaaattaatttaactgaaaaacacgatgttgttgaactgtttgatgaaatatatttggaggtataa

SEQ ID NO: 95919 - DNA, 912 bp, Coprobacillus sp. CAG:826
atgttaatagagacagatgaaatatttgtatggacaaaaaagggaaaagaatgtaaagtgtttcgattaaaaactaatcaagagacaaaaagaaaaatcattaacgcatttaatgatggaattaaagaattattgacaaatgatattggaaaagatagagaaagaattaattttgaaagtcattattatgccgatttaaaagaagagttactaatgatacaaaattttaaagttccacaagaattacttgatgcttttgatcaacctgatcttttggactgctttgagccaaataaagaaggaaaaacaaaggaaaattatgaaataaaagcaataattattggaagaaaagaaggtgaaaattatttttttgcttgtcaaaaatttactcccaaaaaaatggtaatgaaaaagaaaggcatttatttattatatgacagaaatacttttgttacagaagaaccaaaattttcaataaatattgaagaaaagatagattgtatatttactgaaggaaatttgatttttgaaaaatataatgaagcaaagggagtatttgaattagatgattattatagaatagcaagccaaaaagaagtgcaagatttcgttaggagtaatgtatttagaattgataatgataaattattttataaacatacttctagcgtatttatgcgaaaaaaaatagcaaaaataatagatttaggtacattaaatgatactgaaaaaatttataaaaatgctagagttgttaatatggatatagaatttacagaagatggaaagcaaattattatgccagttgaatataaaaaattaagaaaagtaatgtcttttttggctgaggaaatctattctggtcagtttactaattatacatatttaacaaattcaacaagaaaaatataa

SEQ ID NO: 95920 - DNA, 534 bp, Clostridium sordellii ATCC 9714
ttgaaaaagtctgttaaatggctcttatttatttcttcttatattcctctgtttataatattgatatttactaatatagactttaaatcaacttataattttattcaatatatattaacaaatagatgtgaatttattttaaaaaatataaaatttcaggatatttacctttggatattgataattttatgtattacttgtttagttctagtcaaaatagtaattatacaatctagaggttttgaagataataaaaaaattatagatatagagccaaataataattcaatattagagtattttgttacatatttattgacattatcttcttcgggtttttcttttaaagaggtttttatattttggttcatattatatataataggtcatttgtatataaaaaataatcagtttcatattaatccaactttatgcttactatttaaatacaatatatacaaagttaaaactgaaaattcaaaagaatgtttcatactatctaagttaatgaatatgaatttaatagttatttaa

SEQ ID NO: 95921 - DNA, 432 bp, Clostridium sordellii ATCC 9714
atgttttcatataattatcactatacaactaaagctactattacactagactcaataaaatcatcaaatattttaagtaatttcgacgaatttaaattagattgtctagacagatctacaattactagaaaactggctgagttatgtgtgcatggagatattaatatatttatagataaacttaagaataattctaagagtatagaaaagacaatagaaaaatataatttggacatctcattaaaagataacaaaatagtttactctgatgtgtcctcactgtctgaaattataaatttaatatcagataactactttaaaggagatataaccaatgacatatacttggctagaggaaaaagtcgtttaagttcaggcaaaagtaatcctaaaaaagaactactacaaaaaaagaaaatccagaaaaagtaa

SEQ ID NO: 95922 - DNA, 633 bp, Geobacillus sp. A8; identical to SEQ ID NO: 95560

SEQ ID NO: 95923 - DNA, 966 bp, Geobacillus sp. A8; identical to SEQ ID NO: 95561

SEQ ID NO: 95924 - DNA, 585 bp, Peptoclostridium difficile DA00129
atgtttaataaaataatgttatttttgtcatcatatataccattatatatacttatgatagggaaaaatatacttgaaagaacaactatagatggaaagtttaaacatatatctagtaatattattctatttgatggaataaatgactatgctattgctatattaacagttttattagtaatatcttttatatatctatatgtaaaagtaaaaaatgttaagatggaaaaacattataaagttattagttttgaagatgaaaccgtaaattatttttttaattatatatcgatatatctaatatcatgtatgggattaagtttgaacaggataacagatgtttttataataatttttatgatgtttttagttggatatatatatatatccaacaatataatttatttaaatccagttataaatattatgggttacaaagtatataactctaagttagaagcactttctacaggagaaattattaactcgatagttctttttaaaagaaatatggaatttaagtgtgaaattgaggtaattggaactgaaaaaaacaactttattatagccaaaacaaacaaataa

SEQ ID NO: 95925 - DNA, 936 bp, Peptoclostridium difficile DA00129
gtgttaaataattcaataaaaaaaatagaacaaatcttaatagattataaaaatgtacaaaaagaatctttagaaattaatgtaatgtttgtaaactcaaatgttaagagaaaaaataaaaaatttaagggctacatggccaatatatcaaaagatgatataatgccagttgtacaaacaagtatggataatatagaaaaagaagtaaagaaaaatgattttagtaattacgactttgaagtatctgataataaaaaaacatatataattgaagagaaaaatgttttttttagtaaagacattatagaagaaattactttagagcaaaataattttaatactattggcgacttagtgaattttgaaaagttaaactttgtagttatacaagtttattttaataataaaaaactatacttatttagcagatatattcatcctggaaaagcccttaagaatacttataaatatacactaaactcaaaaaagccaaaactaatcaaagatgatatattaactataagttcatatgtagatgcttttttatatgatgggtcttattttatatttaatgaaccgaatttcagaaaaatttttaaatttgatgaagcatacaaaaaattagttgacttaaataaagaaaagataaaatatatttttacgaaggaaacttcttttattgaagattgtataaaagatggaaggtatctaccaagattagcaaaacttttgaattcagatatattgaaaaatattgataaggataaggttaaacatgtaatttcttttcataaactgcaattaaatactgatagtagtggtcttatagaatatgaaaataaatctaacataccattgattttaaatttatttcttgatcattatgtgataacatcattaacacaagaaaagaaagttgcaaaagcctttgaataa

SEQ ID NO: 95926 - DNA, 585 bp, Peptoclostridium difficile DA00196; identical to SEQ ID NO: 95924

SEQ ID NO: 95927 - DNA, 936 bp, Peptoclostridium difficile DA00196; identical to SEQ ID NO: 95925

SEQ ID NO: 95928 - DNA, 585 bp, Peptoclostridium difficile Y270; identical to SEQ ID NO: 95924

SEQ ID NO: 95929 - DNA, 936 bp, Peptoclostridium difficile Y270; identical to SEQ ID NO: 95925

SEQ ID NO: 95930 - DNA, 585 bp, Peptoclostridium difficile P7; identical to SEQ ID NO: 95924

SEQ ID NO: 95931 - DNA, 936 bp, Peptoclostridium difficile P7; identical to SEQ ID NO: 95925

SEQ ID NO: 95932 - DNA, 585 bp, Peptoclostridium difficile P50; identical to SEQ ID NO: 95924

SEQ ID NO: 95933 - DNA, 936 bp, Peptoclostridium difficile P50; identical to SEQ ID NO: 95925

SEQ ID NO: 95934 - DNA, 585 bp, Peptoclostridium difficile P70; identical to SEQ ID NO: 95924

SEQ ID NO: 95935 - DNA, 936 bp, Peptoclostridium difficile P70; identical to SEQ ID NO: 95925

SEQ ID NO: 95936 - DNA, 585 bp, Peptoclostridium difficile P73; identical to SEQ ID NO: 95924

SEQ ID NO: 95937 - DNA, 936 bp, Peptoclostridium difficile P73; identical to SEQ ID NO: 95925

SEQ ID NO: 95938 - DNA, 585 bp, Peptoclostridium difficile P75; identical to SEQ ID NO: 95924

SEQ ID NO: 95939 - DNA, 936 bp, Peptoclostridium difficile P75; identical to SEQ ID NO: 95925

SEQ ID NO: 95940 - DNA, 516 bp, Escherichia coli HVH 9 (4-6942539)
atgttaaataagcttgccaaatatcttcttactgccagctcagttgctccggtattttttaccttagcttttctttcatgtatatcaaaacactataaatttatgattgcttacttatcattgtgtgcaattatacttttactgtgtgttttgattgttaaatacgcaattaaatataattttgtaaccagtaaaaaattaactaccgcctctccagcagataaggagataacaaattatttcttaacctatttatttcccttaatcagtggtccagatgcatttatggatattaggattgcttctttctttgctgtgagtttatttttttacatcagtttttcaggttcctacagtttcaacccattattatcattttggggatataaatattatgaagccgaagacgatacaggcgtaagctttgttatattatcgaaaaagccactgttaaaagcatcaggcaatcgtgttaatttgattaagcttactgattacacatatatagcaatatag

SEQ ID NO: 95941 - DNA, 894 bp, Escherichia coli HVH 9 (4-6942539)
atggaattgtttgcaataacagataatacagttggcacacgcattgtaaaaattgttactgacaggccgactcaaaatgtaatcacacagctattcaatgaacaaaaaactttttttgaagaacgctatacagaaggcgtagaattttcaggtggctacatcactagtggagatgagttttttgtcattcctgactttgatgatgttatcgctgtattagatgctattaataatcccacaactatccctccatgggagccggaagaaatatcagtcttcaatataatcgctctgttttcaggctatcctgaagaggatggaaaacctgcaactgccttaatccaaagcttcgataaaaggcaagttattgataacagaagaacaattttccaaaaaccatttcaggcaagcaataccttttgccagtctactgagcatggtatagtcatcgacaataagctaacagctattcttgcaggtacagaattaaagtttaaaagcttccatatgctccgcaggatatttgatgtagatgcttatttcagagaagccactaatgaagaattaacaagtttttcttctcatgaaaaattttcagtagctccgggttttgatttaacaacaattgctgactctgttattagaaagaaagtttccttgattaataaatcaagaatacttgaggactactctgtgactgagttaagaatatcagcggctgaaattggtgttgttctagaaactgaaaaaatcggtgaattagaaaaaataaaaatgccgcaaataagaaaagatgtaaaaagattattgcattttttagatgaggactatttcacatcccatataaccagaacgctatatcgcgcaaactctaaacgtcgagaagatgtttaa

SEQ ID NO: 95942 - DNA, 615 bp, Escherichia coli HVH 9 (4-6942539); identical to SEQ ID NO: 95820

SEQ ID NO: 95943 - DNA, 1023 bp, Escherichia coli HVH 9 (4-6942539); identical to SEQ ID NO: 95821

SEQ ID NO: 95944 - DNA, 615 bp, Escherichia coli HVH 33 (4-2174936); identical to SEQ ID NO: 95636

SEQ ID NO: 95945 - DNA, 1023 bp, Escherichia coli HVH 33 (4-2174936); identical to SEQ ID NO: 95821

SEQ ID NO: 95946 - DNA, 522 bp, Escherichia coli HVH 41 (4-2677849)
atgttaaataagcttgccaaatatcttcttactgctagctcagttgctccagtatttttcaccttagcttttctttcatgtatatcaaagcactataaatttatgttcgcttacttatcattgtgcgcaattatacttttactgtgtttcttgattgttaaacactcaattaaatataattccgtaaccagtaagaaattaactaccgcttctccagcggacaaggaaataaccaattacttcttaacctatttatttcctttaatcagtggtccagatgcctttatggatattaggattgcttctttttttgctgtaagtttgtttttttacatcagtttttcaggctcctacagtttcaatccattattatcattttggggatataaatattatgaagctgaagacgatacaggtgtaagctttgtcatattatctaaaaaaccactgctaaaagcatcaggtaatcgtgttaatttgattaagcttactgattacacatatatagtaatacaggagtaa

SEQ ID NO: 95947 - DNA, 156 bp, Escherichia coli HVH 41 (4-2677849)
atggaattatttgcaataacagataatacagttggcacacgtattgtcagaattgttactgacagaccgactcaaaatgtagtcacacagttattcagtgaacaaaaaacatttctacacagaaggtgtggaattttcaggtggatacatcactag

SEQ ID NO: 95948 - DNA, 615 bp, Escherichia coli HVH 65 (4-2262045); identical to SEQ ID NO: 95636

SEQ ID NO: 95949 - DNA, 1023 bp, Escherichia coli HVH 65 (4-2262045)
atgttaaagcttgaagaattattagagtatgctgagcaacttaaggatgatgatgcggcgaaaatatcgttgtatttcattactagacatcttaaagcgggtatgagtagaaccgcaagagttgttgataaattcgattttaaaatcattaaagctccaatcgctccagatattgctaaattttttaagtatactttatcaaaccagattatttctcatgcttcgaaagatgatattgtgatgaaaaagtatactgttattgatgatgatattgataataaaatttatgcctatgctatgaataacgcgatatcgttttcaaaagttattaataacgatataaagaatgataaaccagttgtacttacctctcttgctgaggttcagaatgatttgtgggcctattgtattaaagtccaaaagggggctgacgtcacttattctttccgaaaaatcagcagggggaaagtcacaacaaatgaaccacaaaatatgactcagcgcgtattcgctttgtttgataaaacagataaagagttaagatcatttgatggcagcgcagtcaattttgatgacaaaatcgattgtatttatataaaagatcaattttatgtatttcataagaaaagttttgaggctattgtaggcttggaggttgagtttacagaagctgcacaaaaaacattaaatacaattaaagaacttgatcttattgaaggtttagatgttattgaacaagctattcttcataagccatcactgagaaaaattctcactcatatcgctgagaaaggtaaccatacggttctggaaaagaatgatgttcaagctatgaatgatgtgctaaaaatgtttcagaacgaagagtttaagaccaatgagcatggtaaattagtcatagaagatgagaggcaaggaagaaactttctcaaactgttaaatgattattataaacaaggcatgactacaaaaaaatactatggtacggatagcggaaatgtgattaaccctattaaggcgtaa

SEQ ID NO: 95950 - DNA, 516 bp, Escherichia coli HVH 80 (4-2428830); identical to SEQ ID NO: 95682

SEQ ID NO: 95951 - DNA, 387 bp, Escherichia coli HVH 80 (4-2428830)
atgctccgcaggatatttgatgtagatgcttatttcagagaagccactaatgaagaattaacaagtttttcttctcatgaaaaattttcagtagctccgggttttgatttaacaacaattgctgactctgttattagaaagaaagtttccttgattaataaatcaagaatacttgaggactactctgtgactgagttaagaatatcggcggctgaaattggtgttgttctagaaactgaaaaaatcggtgaattagaaaaaataaaaatgccgcaaataagaaaagatgtaaaaagattattgcattttttagatgaggactatttcacatcccatataaccagaacgctatatcgcgcaaactctaaacgtcgagaagatgtttaa

SEQ ID NO: 95952 - DNA, 519 bp, Escherichia coli HVH 193 (4-3331423); identical to SEQ ID NO: 95658

SEQ ID NO: 95953 - DNA, 885 bp, Escherichia coli HVH 193 (4-3331423)
atggcactttttgcagtaatagataatacaattgcaacgagaattgttagagtcgaacttgatgcaacagcaagtacttctgttacggccattttccaacaacagcgtcaatattttgaaagtcatcataacaatatgataccattctatgccggttatacaccaaaacatagtgagtgttttgaaatacaaaactttactgattctgcacgcctgattgacgcagtcaataggcctaccgccgtgcctatctgggatcctagccaaattgatattggttatattaaagcattatttgttggtgttgacgcgccagcaaaccccaatattattgcactacaaactttcaacaaaaaacaaatcttagatacctcaaaatcattctttggaaagctttttgcaagcaaaactacctttagtaaagctaatagcatcggttttaatgttgatgataaactagttgcaataattatcaatgatacaatacgatttaagagtttctttaatctaagaagcatttttgacatgtcgtcctatttttctgctgctactgaccaagaacttaatgcatttagtcaacttagtatattttctactccccaaggttttgatctaaaatccgttgcagatacagtgataagaaataaagtaacactaataaatcagactgggatgctaacaccccaaaatatgtcaaagtttaaatccgaagctgctaaagttaatttccccttacaaaccataatagttggcggtgttgagaaaattgtcatgccttcatcaaaaaaagaaataaaagcccttcttgactttcttgaggaagacatttgggtttctggaataagtggaagacgctttaaatcgaattcaaagcgcccaatataa

SEQ ID NO: 95954 - DNA, 615 bp, Escherichia coli HVH 200 (4-4449924); identical to SEQ ID NO: 95636

SEQ ID NO: 95955 - DNA, 1023 bp, Escherichia coli HVH 200 (4-4449924); identical to SEQ ID NO: 95821

SEQ ID NO: 95956 - DNA, 615 bp, Escherichia coli HVH 207 (4-3113221); identical to SEQ ID NO: 95636

SEQ ID NO: 95957 - DNA, 1023 bp, Escherichia coli HVH 207 (4-3113221)
atgttaaagcttgaagaattattagagtatgctgagcaacttaaggatgatgatgcggcgaaaatatcgttgtatttcattactagacatcttaaagcgggtatgagtagaaccgcaagagttgttgataaattcgattttaaaatcattaaagctccaatcgctccagatattgctaaattttttaagtatactttatcaaaccagattatttctcatgcttcgaaagatgatattgtgatgaaaaagtatactgttattgatgatgatattgataataagatttatgcctatgctatgaataacgcgatatcgttttcaaaagttattaataacgatataaagaatgataaaccagttgtacttacctctcttgctgaggttcagaatgatttgtgggcctattgtattaaagtccaaaagggggctgacgtcacttattctttccgaaaaatcagcagggggaaagtcacaacaaatgaaccacaaaatatgactcagcgcgtattcgctttgtttgataaaacagataaagagttaagatcatttgatggcagcgcagtcaattttgatgacaaaatcgattgtatttatataaaagatcaattttatgtatttcataagaaaagttttgaggctattgtaggcttggaggttgagtttacagaagctgcacaaaaaacattaaatacaattaaagaacttgatcttattgaaggtttagatgttattgaacaagctattcttcataagccatcactgagaaaaattctcactcatatcgctgagaaaggtaaccatacggttctggaaaagaatgatgttcaagctatgaatgatgtgctaaaaatgtttcagaacgaagagtttaagaccaatgagcatggtaaattagtcatagaagatgagaggcaaggaagaaactttctcaaactgttaaatgattattataaacaaggcatgactacaaaaaaatactatggtacggatagcggaaatgtgattaatcctattaaggcgtaa

SEQ ID NO: 95958 - DNA, 615 bp, Escherichia coli KOEGE 77 (202a); identical to SEQ ID NO: 95636

SEQ ID NO: 95959 - DNA, 1023 bp, Escherichia coli KOEGE 77 (202a); identical to SEQ ID NO: 95949

SEQ ID NO: 95960 - DNA, 615 bp, Escherichia coli UMEA 3087-1
atgagagtaaataaactacatttaggtgctagagtttcgctatttatagtgtcataccttcccctattctttatcatgtgttttgtgcaattgtatacttatagaagctatttaaattggaaaggtataagtgttgaatcattaactattttctttaaatactttggcgcggtcagtgtcattggtgtattatcattatttggtattgtaggattaacaatttttttaaaaaatataaaacgtcgatgcgccactagtggtagaactgtaagagttatagatattgaaaataaaaacaatgaatcaataagctatctttttacatatataattccgtttgtatttcaggatctatccactttaattaatgttatacctatagcaatattgttaacggtaacggctttaatatatattaattcaagcatgatacttataaatcctacaataagtattaattatactttatatcaagttacatatttggatttagaaagcgacaaaaaacgcactggtatggttttgactaaatcaaagtatttggaggaagatgatcttcttgatgttgaggacgtgggcccaaaacttttttatgctgaatcccataaggaatga

SEQ ID NO: 95961 - DNA, 1023 bp, Escherichia coli UMEA 3087-1; identical to SEQ ID NO: 95957

SEQ ID NO: 95962 - DNA, 615 bp, Escherichia coli UMEA 3687-1; identical to SEQ ID NO: 95636

SEQ ID NO: 95963 - DNA, 1023 bp, Escherichia coli UMEA 3687-1; identical to SEQ ID NO: 95957

SEQ ID NO: 95964 - DNA, 615 bp, Escherichia coli UMEA 3821-1; identical to SEQ ID NO: 95636

SEQ ID NO: 95965 - DNA, 1023 bp, Escherichia coli UMEA 3821-1; identical to SEQ ID NO: 95957

SEQ ID NO: 95966 - DNA, 615 bp, Escherichia coli UMEA 4207-1; identical to SEQ ID NO: 95636

SEQ ID NO: 95967 - DNA, 1023 bp, Escherichia coli UMEA 4207-1; identical to SEQ ID NO: 95957

SEQ ID NO: 95968 - DNA, 549 bp, Alcaligenes sp. EGD-AK7
atgaagtttgagctttacataatatcgctctggcttctttttgtgctgatgatcatagtcaaggtggatattccaacttgttttggtgcagattgccattatgtgggaactctgcagcttgctcgaaccaatgtgttacctataatttcgttgattttcattgggcttgtgattctttgttattcccgattcaaatacagaactcaggggaatgtagggcttccgaccatagcaaaaaaagtggaagacctaagctatgagcacctcacttttcttacgacctatatcgttccactgatttgctttaatttggataatattagatacatcgtcgctttgttcgttctgttatttgtcattggtcaaatttacgtcaagacagataagttttacgcgaatccaactttggcaatactcgggttcagattgtacaaacttgaggttgacggggtcagtaaagtaatgatcacaactcagcgtatcagcgagttagacaagatagtatttacgacaatagacgaaaaattcgtatctggaaggaaagcatga

SEQ ID NO: 95969 - DNA, 972 bp, Alcaligenes sp. EGD-AK7; identical to SEQ ID NO: 95789

SEQ ID NO: 95970 - DNA, 546 bp, Lactobacillus fermentum 3872
atgctggggctaatttttaaaacgattcttttcttttcgtcatatatacctatctttgtaatgattttccttaataatttagattcattttcgaataactcaatagaaaaaacatggaatcaaaatccgagcttatggttatcgatgattatactttcagttattaccctaattattttgtttatttggattaaaatattaaaagatgaagctgcagataccactaagcaggaatatcaactagaagatttgagaaagtacgattctgaggttctaaatttctttgttacttttataataccaatattatcactggaaccaaaatctggtccttctatagttatgaatctaatattagtaataatagaaggaatatattacatatcaaataatgcattatattttaatgttatcttgataattttgggttaccatgtttatacgttttcaaacgataatatagttatctctagaaaaacaaaagatcaactttttataagtcaacaagctagccaaataggaactacaaatattttttacgcataa

SEQ ID NO: 95971 - DNA, 669 bp, Lactobacillus fermentum 3872
atgagtacacaaaaatttgattcggcaaagttatgggatagctttaactttaataggaatagtttaatgcttcatttaacaggaagaagatataacggcagtttgtttagtgttactcctactattaataaaagcattcaggaaggaataatcaatcttatagaaggccaaattaattattataataatcagaacttaaagcagtatgatattgttggatcaaatgatgatacagtcgaatatgctgatcccaatgattttattaatgaactaggtgaaatatttaattcgttaaagaaacctacggcaattaacaatattgatcctaatagttttgatttttttacatatgaatttaaaagtgcaaataatgaatcaatatatgtatttagaaaaatcaatagaatgaaagctttaaaaaaagggatattgggtgagatagcaaatggtagttttaccaaaattaaaagttcgaaacttttaggtattgataacgcaattgacttcattgttattgatgataagatttttatctttcaccatatttctctagaaagagttctcaaacttaaagatcaatttaaggataaggcaaaagatgttttatcaaatgatgaatttgctaaaaaaaataagaaatttttgataaactcaagaaaagagcactag

SEQ ID NO: 95972 - DNA, 546 bp, Lactobacillus fermentum 3872; identical to SEQ ID NO: 95970

SEQ ID NO: 95973 - DNA, 909 bp, Lactobacillus fermentum 3872
atgagtacacaaaaatttgattcggcaaagttatgggatagctttaactttaataggaatagtttaatgcttcatttaacaggaagaagatataacggcagtttgtttagtgttactcctactattaataaaagcattcaggaaggaataatcaatcttatagaaggccaaattaattattataataatcagaacttaaagcagtatgatattgttggatcaaatgatgatacagtcgaatatgctgatcccaatgattttattaatgaactaggtgaaatatttaattcgttaaagaaacctacggcaattaacaatattgatcctaatagttttgatttttttacatatgaatttaaaagtgcaaataatgaatcaatatatgtatttagaaaaatcaatagaatgaaagctttaaaaaaagggatattgggtgagatagcaaatggtagttttaccaaaattaaaagttcgaaacttttaggtattgataacgcaattgacttcattgttattgatgataagatttttatctttcaccatatttctctagaaagagttctcaaacttaaagatcaatttaaggataaggcaaaagatgttttatcaaatgatgaatttgctaaaaaaataagaaattttgataaactcaagaaaagagcactagaaaatggtaattatgtaaaaagattggctaaattatatgaaaatgatgggattacaatgttccttgataaaatagacaggacaaagaacgtaattgaacaatttaatttagacatagaggtaagtaatggacaattaatttatagagatgaaacacaaacaggaaattttgtcaacttgatgcaagattcatattacaagacattaattggagatcagaatggcatagatgaaaaaaggtga

SEQ ID NO: 95974 - DNA, 594 bp, Enterobacter cloacae EC_38VIM1
atggatagcaggccatatcttaaaacagtactatatatactatcactgtggcttttatttttatcattattaattatgtcctacgataaggttttgataaaaaatgtgtgggactatattttcactgaaaattttacttttccgatctcgtcattgagagtgagaaatatcgttttcatagttagtttggttttcatctttatcggtgcaattattttaataattcttgcaaatagttttggttcgggctggtctgttgcatgtactgtatcagacattagcaatgaaaatcatgagcatttagaatttttaaccacttatataatgcccttagtttttactgatgtcgacagtaaacgaactgtattaaatttaggattgatgatatttgtcatcggcgcgatatacgtaaaaacaaataggttttattcaaatccatcacttgcaatactcggattcagaatatacaaagctaatgttcatgatagaggtgttaaaaaatgcacaattatatgccgtggtgttctaaaaagcacagatagtataaagtatataaaaatcgacgatgaaacttatttggctaaaataatatag

SEQ ID NO: 95975 - DNA, 972 bp, Enterobacter cloacae EC_38VIM1
atgttcactgacattgaaaatattttacaatcacagaaaatctctggtgaagctttttttgttgctgatactcaaggtgttgtagatatatttaaagttaatcttgaacctaatgccgaagtagatctgaccacttcattttccaaaagtataatggataatatcattgaacctaacagaggtaaggcagtaatcccacttgtgtcaacattactggaacgagacaaacaagttttcgaatatgaccatttagcaatcaatcacctccctattgaatttacgaagatgaacgatgtgctaaatttcggagtcaatggtaatgcaacacagtttgatttcactacacaaagccttacatcggtaaaagccgtaatttaccatatttgtgatggcaatgggaacagtgtagtaatttaccaacacaaataccctgtttcactacataagaaaacaaaaaaatctttttttagtttaaatggcagaaccttagataaaataactcatgatagtattgatataaatgacactattgactttttcttcttccagaataaatattacgcattaaatattaaattacttgaaagaatgtatgggttagagagtgtgatagataatcttgcaaacaactcaacgccattgataatcagtcttggaattgttaacacacaaggtatgccagcaccgctagatattttcaaggatatgtataaagacagggcatttatgcgtagacttgctatggtctcgaaaggaagcttagtacaaacgggggtatcaatacctcaaatacaacaagtaatgcagcaattccctgtttttcagagaaatattgatctgacaggtggcttagtgaaccttaatacgaaagatcaaaaaagatattttatccgactacttaataatgaagcttcttttgctgccctcgacaactcgcccttcctggctgttgaaaaagactccgctgcttaa

SEQ ID NO: 95976 - DNA, 555 bp, Prevotella pleuritidis F0068
ttgtcgctttggttgttatttgttatgataattatcataacaataaggattcctatttgtttttcgaaagattattcatttgttggtatctcctacttgcttttaaccaatattatcccactatgttccggtttagctttgttcataggaggatgttcatatttcaacttcgagcaccaactgaaaggcacaaaggaattaacgtttaaaattacagaaatcgagaatattgattacgagcacttgacttttcttacaacatacatcattccattagtctgtttccagtttgagaatttgcgatatgtcattatctttgttattttgctcattataattggcttaatatatatacgtactgatatcttttacacaaatccaaccttggctctgctgaagtttaggatttataaagtgacagggactttcagaaaagaagaagtgagggagaatataattataataacgaaagaagaattaaatatcaaagatgatgtgaaatatatcaagttggataaacggatttattatgcttcaaaagtaaaaaacagatga

SEQ ID NO: 95977 - DNA, 942 bp, Prevotella pleuritidis F0068
ttggatagtgcgcttgcatttatagatgcaccgcagggagagttacaaataattctatatgcaagccttgaaagcattgcagagccgagaaaattagacataagggaagaagatctatcaggacttcgcgatttgtttgtatcaagcattcaggcttccatcatagaaaaagaagactatacagtattaccactatcaacagcggatgaacgagggaattgtttctatcaatatgatttagaagttcctgatgaattgcaacttttagaaacgacaataggaaatgataatctgcaaaactttagtttccctgataatcagttttcaaatatagaatctctcattatagttctagcagatagggaacatgagattgcattatttaagaaactgtcagcagtcgaagtgatcggcagaggtgggtttatgctctggaagtccaatcaaagattggaaaagtttaatgatcaattattacggataagctccaggttccaagcattaagagttggtggtgagattattatcactgatttggcttccatagaaaagggatttggcttccatgatataattatccgagaagctactaatagtcttggggtcattgagggtttgcaacttgtgagtaacatagatagtttgaaggagttagtaaatgatgttcgttttgctcgaaaactgacaaaagttgcacggaactctccagttattcagcgaaatattcctaacacagatataattgcattttcaaagaggcacccacttactaagaacaaaatgcgatacaatgaaaatcagactcaattccttttggacactcgagtttcaaaagacttgttgataaaaatcctaaatgatgatttgctgacttcagaattaaccaaattgtattacgatagtttggcaaaagatggaattgaagttgaggaggaggaataa

SEQ ID NO: 95978 - DNA, 273 bp, Salmonella enterica
  subsp. enterica serovar Typhimurium str. 35423
atgcctttggtatttactgatgtgaacagcaagaggactatgctgaatcttttgatcatgatagtagctatagggatgatttatgtaaaaacaaatcgtttttattctaatccatcgttagcattgcttggatttagaattttcaaagctaatataaatgatagaggaaccaaagaatttgtaatcatttgccatggcgaaattgataacaacagcagaataaaatatatcaaactagataacaatacatgtcttgctaaaatcactcaataa

SEQ ID NO: 95979 - DNA, 978 bp, Salmonella enterica; identical to SEQ ID NO: 95651
  subsp. enterica serovar Typhimurium str. 35423

SEQ ID NO: 95980 - DNA, 597 bp, Salmonella enterica
  subsp. enterica serovar Typhimurium str. 34502
atgaaaaaaagaacaggtttaaagtatgcattatatatattgtcactatggctattgtttgtatcactttttataatgtcatatgacaagaatctttttgtaagtatatcaacatatctggacagcaaagatacaggaacattactttcaagcatcacgcctaaaaatatagtttttatttccagttttgcaatgatagtagcaggtgttttaatttttctatatttattactttcctttaactctggttggtcggtagcgtgcacggtttctgatgttagaaatgaaagtcatgagcatcttgaatttttaactacctatgttatgcctttggtatttactgatgtgaacagcaagaggactatgctgaatcttttgatcatgatagtagctatagggatgatttatgtaaaaacaaatcgtttttattctaatccatcgttagcattgcttggatttagaattttcaaagctaatataaatgatagaggaaccaaagaatttgtaatcatttgccatggcgaaattgataacaacagcagaataaaatatatcaaactagataacaatacatgtcttgctaaaatcactcaataa

SEQ ID NO: 95981 - DNA, 978 bp, Salmonella enterica; identical to SEQ ID NO: 95651
  subsp. enterica serovar Typhimurium str. 34502

SEQ ID NO: 95982 - DNA, 582 bp, Pantoea agglomerans Tx10
atgcaatttcaaataatacccggctttttcatttttttaggttcgtacttgcctcttgcatttatattagcattgcaagatattcctaagacatggtggagtaagaaactatgtacagttcagagcttctctgatgggagctgtgtattcattcctttcgagaatccaataatctcaatttctttcctactagtgacttttatagctattttaatagtattggtgtcacttaaaaagataaaatacccattcgaggttgaagttaaaaagtataaaaaaatacctaatgagattataaattacacattcccctatattgtatcttttatgggtataagttacggcgatccgcaaaaattaataggctttatggtatttcttctgtggatgtttgctatcacatacaagtccggtcagattctaatgaatcctctgcttattattatgaagtggaagatttatgaggcaacaatagttataagtaatgtggaaaaggatgttcgtatacttacgcaaggagacttaggcatccgaaaggtctctgctcaaactattcaagatttctatattgttaaaggataa

SEQ ID NO: 95983 - DNA, 915 bp, Pantoea agglomerans Tx10
atgcaagcacaatttaattcatttaagagtcatgatattattaacagcaatgtttatctttgggtttttaagagaagtgcaactgcaagtcgtttcacggctcattatgtgcaaactgatgatccattgaatgaacagctaaaactaattgctcttagtgaatttcagcgaataacagagtttcaagcttatagttacttggctgaaactaatgaaaatagttgtctttcaacagttattgctggtagtgatttcaccagtcttaaaactcttgttgatagaccagaaccagattttagactgcaaaatgttaaggaattaaagaatgttagtggctatgtagttaaatttatcaataatgggctaactctttatgctattaaacgtagtactaaaaactggaaggcatcatttttaaaaactcatgtaaatattgtttttagaaatggagagttgtcagcagcagaggatgaggcttttgtaattgagaggaattttgatttctatgcaatagatacggctctgtttattgccaataagcgagcttttgaatcggttatggaacatagagcttcttatacagatgctttcacaaatcttcagttgaaagcttctttttctgaccttttcacggatatgactactttaattaattatgttgggaataactcaattcagcttcgcaggatggctagggttgaggagaaagcattatttcaatctccacattttttatcggcggtccagaatgttaataatagacgtgcttgggggcttaatttcgatccgataacaggtaaaatcataccttgtgagcaaactataaaaacaataatgcaaattttattagaccaccgtttattaagtgaagttactgatgttacatatgatgtccctgacgcaacgcaaatttaa

SEQ ID NO: 95984 - DNA, 591 bp, Prevotella salivae F0493
atggtaagttttgtttctaaatttttgtttacagctacggtaacggcaccagtattcttgtcacttggattaattggcatcataaaggatagtaagaattattttcaatattggaataagctgctagaaaataacataatccctaatagttttgaatggtggagcataaatataagttttgcatttatgctaatatgccttattggcattaagatattccttcgcaaaaaatcttgtaaatgtgggaaaggaaaaacgattaaggcacagttttattcaaatctgtctcaaaacagtgctgagcaggtaatatcatcaataattccttggctgactatatttgctgacagacttgattttatggtattatttgtgtgtataatacttcaatgttgttttattgcaattgcaagttataataacaataactataatttactgtgttcaatatggggatatcgttattatgaggtaaaaacggaagaaaatacatatattcttatttcccaaaaatgtattagaaataagaatgaaatcaaaacgtttgttgagttgacagattatatgggtctaatcattaatgacaaataa

SEQ ID NO: 95985 - DNA, 852 bp, Prevotella salivae F0493
atgagtcaattttacgcattgatgcacgacaatactgtaaagtatatatctctaaaagaagagattgtaaccgatgttagaaatctctttataaacggaggtgctatattaaaacctgaaggtatagaagaggatgtatttgatggtaatatcttaagccgaaatggagaaaatattacgtatgtcaattataacttaccagaagattttattcatataccagataatcaagctgacatgtctgaatataatataaatgaggacatacctaaaagtatattttattacaatgacgggaaaatttattttcaggtttttaacaagaagaatatgttacaacgtaaaatggtcttacagtttgagcatgggaacgtatttactaaaatgaataacacagcttttattgttgaggataaagttcatgctatatacgaggatgggaagttgtatttccagaattatacaattgcaaatcagatattctcattaatagatttcatcaccgaagccacaaatactgaaattgaatcctttggagagatagaaggcatcaatgtaagtacagaaaacataaaacatattgcgaatataaagactcgtcgacttataaaattattatccaatacagataatattgcaacttttatgagaaaggcatctcgaacaagaactagtcttttaaggaaatatggagtaaacgcacaaatcaacgaaaacaatgaattagtattactaactaataatgttgcagatttgaatcgcgtcttggaatttcttaatgaagatatatttagaggagtaatcaccgatagcctttaccgatcaaattcaaagaaaaaagataatcattaa

SEQ ID NO: 95986 - DNA, 579 bp, Pseudomonas sp. HPB0071
atgaaggtcaagatccttccagcaatcttcctgtttttaggctcttattttcctctgagcgtgatcttactgcttcaagatgtctctgaagccacctggaagcaatctatttgttggtcactagacaactgcactcttccaacattaatgaacccagaccgctctctaccgttattcatcctttgcttaattagcctcgccttctttacttgggttttaaaaagtttaccatccgatgatgaactcaccgttagagaagcgaaaacggtacctaatgaccttatcaattacgttttcccttacgtcgtttcgtttatggggcttgatttaggaagtaacggtaaattctatggttttttagtcttcttatcctggatgtttcttataacttatcgttcagggcaaatattgatgaatcccctgttgctagcaataggttggcaattacatgagttggaaataatcacatccggtaaagaacgtagtgtaatcgcgcttgccaaaactagagtctatccaggaaatactctcaattcatgcgtcattcaaggaatttacgttcttacaaaaaaggagtag

SEQ ID NO: 95987 - DNA, 924 bp, Pseudomonas sp. HPB0071
atggctgcaattgatgtgttgaacaagctccaaggtttagatcttcaaaacgctatagtcagcgtttgggcattcaaaaagagcgctagcaaaaatgctaaattccgtgccttatcagttgtcgtaacttcagatttgaaaaatgagttaagccgtatcgctcgtcaatgcattgatcgttgcactgagattgatgactacagtctgctcacaatgactaatgaaagttcttgtttataccttgagtccgatgagaccatttttcctaagcttgaggagcttgtaagccaaccgccccaagagcatcgcattgaaaatctttcagatctggaaggaagcttaggttatctaattcggctgagcattggcgaggatacactctattgcgtctgccgcctgggcaacgactggaaagtcaaaaaacgcgcgcaactccttaatcttgtacttaaccgtaaccaacttgatctggcgaatgatcaggcatttatcatccccaagcgattcgacttttttgtattaaataaagatatcttagttctaaataaaggtaactttgaatcgattttagaatataagcaaacatacgtaacttcatttgccgatctccaagctgatgcagggtttcaagccatcttctcagacataagaattcttgttgattatgtaggaaccaatacaatgcatttgcgaagaatggccgtagttcaagagcggggctattataatgacgcggtcttcatggaaaagttgcgtcaaatcagccaagagcgacaatggagcatagcttttgataatgaaggtaggatcattccatcagtcgactcggcacgaacaataatacaagtattgctgaatcaaaggctgcactcagaattaactggagatgattttgatgtaccttcggctaatcctgtcgcatga

SEQ ID NO: 95988 - DNA, 576 bp, Streptococcus sp. I-G2
atgcagcgagatcttttttctaagtggacattgtttatcacctcgtatctaccactatatttatggcttctttttagtaatattaattattccaaattctcatttgagagattaatagcttttgattttgaccataaattgattcgtatagtttttgttgttctaatttttatttcaattattaaattatggaaattatttaagtttgacggtaaggaaagtctcaaaataccgagggaaatggaaatatcaccggaaagtgactcattgatgaactacattgttacgtattttactccgttactgtcttttgatatgaataatacaactagtattttcatgaattcattgttatttcttttgattggattaatgtatgttggtagtaatgcaagttatctaaaccctgttctaggagtttttgggtttaagatatttggagttacaggttttcctcacgctcatcatatcataacaaatctctcgtttgatgatatagaaacagcgagagcaacagatgtagaattaactagttatagattaggtgatggaatttacattttaaaaagaaaataa

SEQ ID NO: 95989 - DNA, 978 bp, Streptococcus sp. I-G2
ttgattcaaataaacattaatgacgaaaaaaaccggttgatttcttttagtcaacaaccagattttgatgaatatgttaagatttttctaattaaaattaagaaaaatgagatttttttatataaacaagatgctgataagaaaactaaagaaaatatacttaaagccattattgaaagtatgaataaatctacttttagtaatcgagaaataaaaccatatgatccagtcataacatataagaatgtacatgagcaagtagaggtttcagaatatgagaatgttcaatctgtaatttcacaatttaatgatgaacaacaacatctactgagtacaagttgtgagacggaaaaagatttgcataactatttgattgaaataaagaagagtggtgttattaatctaaaatttatcggttcttttgtgaatgcatttcaattgaaaaaaaagatgttatttggtaattttacggatagtaaaattaaattaagagaacgaaataatctatttggtttaaataaaaagattgatttaatgattgtaaatgatgaaaaaattttaatcaatcaagcagaatcaaaatttgattctatatttggtatgaataaaaaatttgctgagcaagcaacagaaattctaaatactgatgcaaatataaaaactatatttgaacaagcttcaattaattttttgaaaacaaaagtgatcaatggtaaaagacttgctacgaggttaattaaaattgtttctgatacgaatcgttttacagaaacagttaaacatattgacaaaatacaaactataaaagatgatcctaatcataaattttataaagaaattgaaggggttacgttcagtaatggaaagctaagtattactgatgagaaaaattgtgtacaattgattaatgctatatcagatgctcttgtaacagcttatatttccgaagttgaaacggttgaagaaggacgtatgtaa

SEQ ID NO: 95990 - DNA, 600 bp, Pseudomonas aeruginosa BWHPSA002
atggataacacccgcgacccgtcacttcggcttcgtccatgggcatcgctggtgctctttctgagcgcctattcgccccttatgctgattctgatcatcaaggattacgatgcaaccagccccggtctgcttccccagaatccggtattcagcggcatcctgttgctgatcgcagtgttcagcagtttggctgtgcttcgttccgtcagagaaatcgatggcgggctgacggtgacggtcaccaaggcgtccaacaaatcgggcgacatgttcggctacaccatcccctacatgctttcgttcatgaaggtggacctgggagactggcaggtcattgtgagcctcgccctttttctagccattcttttcatcatggcctaccgcacccagacggttttcgtgaacccgattctcgctcttgcgggttacatgctgatcgattgcaccttcaaacgcggtgacaaggaaattcaggcgatggtcgtgacacggcaaccgctggccgtgggtgacacttgccgcatggagcggatgtcgcactatctgtatgtggccgtcaaagacaacgccaatctggataaaaagggcacagaaaaatga

SEQ ID NO: 95991 - DNA, 939 bp, Pseudomonas aeruginosa BWHPSA002
atgagcaacaaggcgcacaaggccaccttgaaggcgatcaaagcgatcgatctaaaaaaatggggggtcactttctggcttgtcaagcgctacatggcaaatcacgcggcacattactcagtactgcgcgtcaacaccgatgccaagctccagaagcggttgaagggctatgtagtcaatcagttgcagggcaaggactttcacttggccgaatacgatttcaataatgccgatggtgatgacacgctgttcacgattacggcagacgccaccgatttccctaaagtcgaagtggcgataaacgctggctttgacaatgccatcgccaaggaataccaagacctgctcaattcgtgggcgtatgtcgtccagcttgaacacggcaatgatcgactctacgcctggcgcaagatcagcacactcacccagccaaagaaagttcaatcgcgccaggcgacgttctttgtcgaacacaaattggtggacgtagaagacaaggaagtctttctgatcgatccgcgcttcgacttcttcgtgcatggcggcatgatcttcattgccaacaagaaggagttcgaaatttccatgaacttccgcgagggcatgaaggccaaggctgccgaggtcatccagaacttcaatgagagtggccgtttcaagaatgtcgacctcattcagaagcacgtgggcgacaacctgcaccacttgcgcaagatggcatcgatcctcaaggccggttactaccaacagcccgactatatccagcgcatgattgaagtcagcaaggaagaaggctgggagctgaaagtcgaggatgggcaagtcgtggtcgaggcggaaacgatcgacgtgttgttgaagctgctcaacaacgaccgcctgcgctcgccgatcaacaacgaaattttcgacgcggccgccaaggcacctgtgaaatag

SEQ ID NO: 95992 - DNA, 504 bp, Salmonella enterica subsp. enterica serovar Agona str. 266757-1
atgggcaaccagctatctctatccgtgtcaaggttatgcgtttgtatttttttggtctttttgtgtggctatacttactggtggtataagagacagctttcatttttggatagggggattacctctgccgaagtggttgttgttggatgcgaaaaagagtcaactgagtatctgtcatttttgtcaacttacataatgcccctggtttttacagacttaacaaaaccttcaaatgttttcaatttcatttttattctagttattgtcggatttcttcatataaaaacaagaaggattcatagcaacccaacgctttcattgtttggtgtttctgcttacaaaattgactatataatcagggttgatggtcaggattctgatatcacaaaaggattgattgtcctgtcgaaggatgagatatctgtgaaaagtgtaattcgaatcataaaaaaagaagactacattacattcgcaaaatacataaggaacgattcaaatggctga

SEQ ID NO: 95993 - DNA, 1146 bp, Salmonella enterica subsp. enterica serovar Agona str. 266757-1
atggctgaagaaaaactggatttaagcgagctccatcatgacgcgcagaaggcctctgagctctcatcctattactcccacttcgatacaaaggtagaagattttgaccttcatgtatattttaactttaggcataagataaagggcggtgatggaaagtaccgttacgaatatcgggttgcaaaaatagatgatactactgttctgaaagaatcaatcaaagataacgtgataacaaaaacccttaatgatctaagtagcggtggagttgcagtatctgatataaagcagcttagtgatagggctagcactatatcatttttagaagatgcaaagtcatacaaagatgaacagatgtcttttttgacaggtattatttttgataagggatttggaggtgatggggatattcctgtcgtcaattttgagaagtttgataaaatatcaaaggttgactcaattgtttttgtcttaaggaaaggtgataaatgtataacaatatacaaaaaacagtatcctatacagaacctgaccaaacagaaaaatcattacttctcatatagcaaagatacgttatcaaaaatagatgctgacatgatatcaattgatggaaaagcctctattgtttttgttaaaggtactgcatatatctatgatcaggatgtttttgagaaatttttcggatacaagaagtggataaaaaaagttgcgggcgaatttgtttctgaaatgaagcaaaaattttcatcgatagtagactttggaaaagttaccgacaggcttgaaaaagaaagtgctgatgcagatgccttttcaaggaaactggcaagaatatataacaataaagatctaagagcttcctttaatactgttacaccagaaaaaatcagtgattttttagttgaaaatgagtatttcgctagattgctaaagtacaaatcagcggaagaacctttagaagtatcaacccatgatcagcaggaagcatttatattaatagtttctgagggcgttcttcgctcgcttattactggttttgattatttaagccctgccgcgaaaagaaaaattgcgacaggccaaaccgcgcaaaaaccttcttctgtagtaactaggataccctccagcgcatctgacgccgcctaa

SEQ ID NO: 95994 - DNA, 504 bp, Salmonella enterica subsp. enterica serovar Agona str. 467481; identical to SEQ ID NO: 95992

SEQ ID NO: 95995 - DNA, 1146 bp, Salmonella enterica subsp. enterica serovar Agona str. 467481; identical to SEQ ID NO: 95993

SEQ ID NO: 95996 - DNA, 603 bp, Clostridium autoethanogenum DSM 10061
atggtgagttctttagcaaaaatatttatgtttttatcatcatattcacccttatatatattaactataactttaaattataattttttagatataaaagaggcaattattaaagtatctaatgtaaaaaatattgtatattcagatatattattatatggtttattccttttaatagtaatacctaatgtaatattatatattttaatatcaatttctaaaaaatatgatgaacctataaaattgttgaagatcgaagatggaaatgaaaaagttttagattatattttagcttatatagtatcatttgtaacaactgattttcctaaaataaggactaatgattctaaaatagttatcactgctattcttacacaaattttattaggatatttgtattgtaaaggaaatatgttttatataaatccaatacttgatcttatgggatataatatttatattggaaagacattacaaaataatgtaataatattaagcaaaaataaagaaacaataaaagatataaaggaaagcatatctaaaaatggttttaagaatatagatttaaattgtttcgctgataatatttatttaactaaataa

SEQ ID NO: 95997 - DNA, 459 bp, Clostridium autoethanogenum DSM 10061
atgaaaaaaatagacaaagatattttatcattaaataataaatttgattgtgttatgtataaagaagacattgctatattcactcaattatattttgaacaaatatttgattataaagatgaatatacaaaaaaagcaaataaaactatttctaaaattaaaaaattaaatattattgaaaatattgataatatagaaagcgattgtgaaaaaataactataaagaaaaagatgtctaaaattaaggatgaaagcattaactggtttaaagagaaagtagaaagtaatattgaagatattaaaaatattatatctaaggctaatttagatatggaagttagaaatggaaaaataatttcaaatgatacttctgagttaatacacttaattcaagatgattaccttaagtcaaatttatctggtaacaattttgtagcggataaaaaaacaaagatttaa

SEQ ID NO: 95998 - DNA, 615 bp, Escherichia coli 110957; identical to SEQ ID NO: 95636

SEQ ID NO: 95999 - DNA, 1029 bp, Escherichia coli 110957
atgaaaatgttaaagcttgaagaattattagagtatgctgagcaacttaaggatgatgatgcggcgaaaatatcgttgtatttcattactagacatcttaaagcgggtatgagtagaaccgcaagagttgttgataaattcgattttaaaatcattaaagctccaatcgctccagatattgctaaattttttaagtatactttatcaaaccagattatttctcatgcttcgaaagatgatattgtgatgaaaaagtatactgttattgatgatgatattgataataaaatttatgcctatgctatgaataacgcgatatcgttttcaaaagttattaataacgatataaagaatgataaaccagttgtacttacctctcttgctgaggttcagaatgatttgtgggcctattgtattaaagtccaaaagggggctgacgtcacttattctttccgaaaaatcagcagggggaaagtcacaacaaatgaaccacaaaatatgactcagcgcgtattcgctttgtttgataaaacagataaagagttaagatcatttgatggcagcgcagtcaattttgatgacaaaatcgattgtatttatataaaagatcaattttatgtatttcataagaaaagttttgaggctattgtaggcttggaggttgagtttacagaagctgcacaaaaaacattaaatacaattaaagaacttgatcttattgaaggtttagatgttattgaacaagctattcttcataagccatcactgagaaaaattctcactcatatcgctgagaaaggtaaccatacggttctggaaaagaatgatgttcaagctatgaatgatgtgctaaaaatgtttcagaacgaagagtttaagaccaatgagcatggtaaattagtcatagaagatgagaggcaaggaagaaactttctcaaactgttaaatgattattataaacaaggcatgactacaaaaaaatactatggtacggatagcggaaatgtgattaaccctattaaggcgtaa

SEQ ID NO: 96000 - DNA, 513 bp, Klebsiella pneumoniae 909957
atgaataggctagcacgtctattacttacagcaagctcgattgcaccagtgtgcgcaacacttttttttataggttttgtaaaagagacagtgtggcttatgaactacagcctatacgtagggttagctagttggtgtttagctataggcttggtaaaatacgccgattgcaagatggaacggcttacaaaaaacatcaattctttatcaccagctaataaagaggtaactaattattttttaagttatcttttccctttgttaggtacagattctatttctgaaaataaatcctatgctttatttttctatttctctttgctattttatatatgtttttccgaaaactacaatttcaacccagtcctgtcactgcatggatataaattttacgaggcagaagatgatactggggttgggttcgtattgatttcaaaatccgtaattacggatataaaaaatattagttttaatgttgttcaactaacagattacacatatctacatgtataa

SEQ ID NO: 96001 - DNA, 885 bp, Klebsiella pneumoniae 909957
atggccctttttgctttgatggataagtctatcgcaaccagagttgttagggtagagttagacttgggtgctagcacttctgtgtcgtcgatctttcagcaacagcgattacatttccaaactcatcacaataatcacatagctttttacgcaggatatgaacctagatatgatgaatgctttgagatacaaaatttcgcagatgctgctttattaatagatgctgcaactagacctactgccatgcccgtctgggatccaagccaaataagcatagataatatcaaggctttattcgttggcgttgatgccccaggaaatccaaacataattgcgttgcaaacctttaacaaaaaacagatccttgacacatcaaaatcatttcttgctactatgattggtagaagcacaacctttagcaaagctgttgatgtaggatttaatctcgatgacaagctagttgcaattattgataataataccatttgttttaagagcttttttaaattaaggagtgtatttgacatgacgtcatattttacagctgccacagatcaagatttagatgcatttagtcaattgccaatattctctattgctcaagggtttgatattaaaaacgtagcagacacggtcattagaaataaaataactctgataaatcaaactggtctactgacacctcaaaacctcgcacttttcaaggcagaggcagtaaaggtcggcttccccttacaaaccgtagtagtgggtggtgtagaaaaaataaccatgccttcttctaaaaaagaaattaaatccctcctagacttcatcgaagaagatatttgggtttcaggaattagtggaagacgctttaaatcaagttcaaaacgcccaatatga

SEQ ID NO: 96002 - DNA, 519 bp, Salmonella enterica subsp. enterica serovar Miami str. 1923
atgaacaaattagcacgcttattattaacagccagctcaattgcacctgtttgcgcaactctattttttattggatatgtaaaagatacggtttggctgatgcaatatagcttatgcgttggcatagcaagttggttattagcaataggcctgattcaatatgctgagaaacaacttgaacctctgacaaaaaatattagttcagtttctcccgctaacaaagaagtaactaattatttcttaagctatttattccctctcctaggaacagactctattgctgaaaataaagcatatgcgttattcttttatttgtcattgttattttacatcagcttttccgagaactataactttaacccagtattgtcacttatcggttataaattttacgaagctgaagatgacaccggcgtaggttttgtattgatttctaaatcagtcattactgatattaaagatatcaaatttacagttattcaattaacagactacacatttctacatgttaaaggataa

SEQ ID NO: 96003 - DNA, 885 bp, Salmonella enterica subsp. enterica serovar Miami str. 1923
atggcactttttgcagtaatagataatacaattgcaacgagaattgttagagtcgaacttgatgcaacagcaagtacttctgttacggccattttccaacaacagcgtcaatattttgaaagtcatcataacaatatgataccattctatgccggttatacaccaaaacatagtgagtgttttgaaatacaaaactttactgattctgcacgcctgattgacgcagtcaataggcctaccgccgtgcctgtctgggatcccagccaaattgatattggttatattaaagcattatttgttggtgttgacgcgccagcaaaccccaatattattgcgctacaaactttcaacaaaaaacaaatcttagatacctcaaaatcattctttggaaagctttttgcaagcaaaactacctttagtaaagctaatagcatcggttttaatgttgatgataaactagttgcaataattatcaatgatacaatacgatttaagagtttctttaatctaagaagcatttttgacatgtcgtcctatttttctgctgctactgaccaagaacttaatgcatttagtcaacttagtgtattttctactccccaaggttttgatctaaaatccgttgcagatacagtgataagaaataaagtaacactaataaatcagactgggatgctaacaccccaaaatatgtcaaagtttaaatccgaagctgctaaagtcaatttccccttacaaaccataatagttggcggtgttgagaaaattgtcatgccttcatcaaaaaaagaaataaaagcccttcttgactttcttgaggaagacatttggatttctggaataagtggaagacgctttaaatcgaattcaaagcgcccaatataa

SEQ ID NO: 96004 - DNA, 504 bp, Salmonella enterica subsp. enterica serovar Agona str. 648586-1; identical to SEQ ID NO: 95992

SEQ ID NO: 96005 - DNA, 1146 bp, Salmonella enterica subsp. enterica serovar Agona str. 648586-1; identical to SEQ ID NO: 95993

SEQ ID NO: 96006 - DNA, 588 bp, Escherichia coli UMEA 3323-1; identical to SEQ ID NO: 95656

SEQ ID NO: 96007 - DNA, 960 bp, Escherichia coli UMEA 3323-1; identical to SEQ ID NO: 95657

SEQ ID NO: 96008 - DNA, 615 bp, Escherichia coli 907710; identical to SEQ ID NO: 95636

SEQ ID NO: 96009 - DNA, 1029 bp, Escherichia coli 907710
atgaaaatgttaaagcttgaagaattattagagtatgctgagcaacttaaggatgatgatgcggcgaaaatatcgttgtatttcattactagacatcttaaagcgggtatgagtagaaccgcaagagttgttgataaattcgattttaaaatcattaaagctccaatcgctccagatattgctaaattttttaagtatactttatcaaaccagattatttctcatgcttcgaaagatgatattgtgatgaaaaagtatactgttattgatgatgatattgataataagatttatgcctatgctatgaataacgcgatatcgttttcaaaagttattaataacgatataaagaatgataaaccagttgtacttacctctcttgctgaggttcagaatgatttgtgggcctattgtattaaagtccaaaagggggctgacgtcacttattctttccgaaaaatcagcagggggaaagtcacaacaaatgaaccacaaaatatgactcagcgcgtattcgctttgtttgataaaacagataaagagttaagatcatttgatggcagcgcagtcaattttgatgacaaaatcgattgtatttatataaaagatcaattttatgtatttcataagaaaagttttgaggctattgtaggcttggaggttgagtttacagaagctgcacaaaaaacattaaatacaattaaagaacttgatcttattgaaggtttagatgttattgaacaagctattcttcataagccatcactgagaaaaattctcactcatatcgctgagaaaggtaaccatacggttctggaaaagaatgatgttcaagctatgaatgatgtgctaaaaatgtttcagaacgaagagtttaagaccaatgagcatggtaaattagtcatagaagatgagaggcaaggaagaaactttctcaaactgttaaatgattattataaacaaggcatgactacaaaaaaatactatggtacggatagcggaaatgtgattaatcctattaaggcgtaa

SEQ ID NO: 96010 - DNA, 612 bp, Escherichia coli 907889
atgatttcatcactgggggataacatgaaacgaaaaagcacattcaacaagatgggactatacatactgtctttaatgttgctgtttgtttttattatcattttgagcgcaaaaatcccattttgttatggctcttcctgccattttataggtttttatcaattagcttccagcaacataatctcaataatttgtttaatttttataggaatagcattttatttctatagaaggtttaaaggattgacgaaggtcaacaatgctgactgtgtaacaatcactgcttgccaaagtgagagctatgaaagtttgactttcttagcaacttacatagtaccttttatgggattcagttttgatgaccctcagaaaaacattgcgtactttctcttaatagtagttattggtttaattttcattaaaacggataagtattatgcgaatcctactttggcgcttttcggttataagttgtatagagttaacatttctcatgcaggaagtggtgaagtaaaaaacgtcattgcaatctcgatggatgtgctgactgttgacgatcaagtattctatagtttttttgatgactacgttttcatagcaaggaaaaaataa

SEQ ID NO: 96011 - DNA, 960 bp, Escherichia coli 907889; identical to SEQ ID NO: 95657

SEQ ID NO: 96012 - DNA, 273 bp, Escherichia coli 910096-2
atgcctcttgtattcactgacgttaatagcaaaagaacagtaatcaacctgctgctgatgatttgttttatcggtgttatttatgtcaggacaaacagattttatgccaacccatcgttggcaatacttggcttcaggttatataaatgtgttattaaaaatgatccttctggtaaggagtacacagtaatatgtagggggaaaatgtctaatgattgtcaagttaaaataaagaaaattgatgatgatactttgatcgcaaaacttatttga

SEQ ID NO: 96013 - DNA, 1008 bp, Escherichia coli 910096-2; identical to SEQ ID NO: 95747

SEQ ID NO: 96014 - DNA, 501 bp, Eubacterium brachy ATCC 33089
atgatctttctcaacgatatgaaagagttttcgttagaacaagtcggcataactcttcacaaaaatacggttttttggagtgtattgacaggggttttcatactgagcttgctgacgttgatattttggttggtaagaatggctagaaatgcccaaaaacaggttaagctgtacgagatttatgatattagaaacaacgatggcgaggttttgagttatttcataacatttgtaatcccaattttatctctgaaggtcgattcagcgccatcgatagtgatgaacgggatgattatggcgttggtgggaatttatttcgtgcaaaataatgttttgcactttaatccattgctgctgttggcagggtaccacatatattcagacagtgccgatcacattataatatcgagatgcgataagtacacaattaaaaataaagggttgaaagcagatcagtttggaagcagcaatattttttatataaagaaacctaaaccgtag

SEQ ID NO: 96015 - DNA, 891 bp, Eubacterium brachy ATCC 33089
atgaaaatggaaatttttgaaagagcaagacgcaatgtcgataccggaaatgtagttatatatttctgcattaaaaacgacagagaaactgtaccgataaaatttaatttgggaaacgacagtaaggaaaaaattcgtgaaatagctcgtgaagttctaaggaaatgtgaaaaatacagcatagagaaatacaatcccatcggagcgatttcaaatacgctggaaaaaactacgacagatgaatttgaaatggtgcaagagctgatagacagcctggaaaaacccggagtcagcgatgatataacggcggaagacgtgaactttgtcatatatgaatttagaaccatgaaaggcatcagttatttcatgagaagatatacgaagctccaaatttttaaaaagggattcttgggaaggctgatggatgacaaatttgaaaagttagatgcgtcaaagctattaggcatagatgcaactgtcgatatcatagtagatggtcgcgatattttaataattcagcatacagcctttgagcgaatatttgatctggacagagaatttgttgaggctgcgaaagaagttttgagcaacccgaaattggatgaaaaaattgagggattcaaacagcttaaagaggatttactggataacggaagttatgtaaaaagagtgtcgaagcttaaaaacagaaaaaatgcaatggtatttttggatgctcctgagaacaccaaaaaggcaattgacgaatttagattaaatataccgataagtccttcaaataaatacgtgtacacgggaaagtcacaactgggagagtttataaatttgatgcaagacgcttattacaagacgataattgggggagagaaaggaactgacgaaaggagataa

SEQ ID NO: 96016 - DNA, 594 bp, Klebsiella pneumoniae BIDMC 25; identical to SEQ ID NO: 95974

SEQ ID NO: 96017 - DNA, 972 bp, Klebsiella pneumoniae BIDMC 25; identical to SEQ ID NO: 95975

SEQ ID NO: 96018 - DNA, 600 bp, Enterobacter cloacae BWH 31; identical to SEQ ID NO: 95808

SEQ ID NO: 96019 - DNA, 960 bp, Enterobacter cloacae BWH 31; identical to SEQ ID NO: 95809

SEQ ID NO: 96020 - DNA, 558 bp, Klebsiella pneumoniae BWH 28
atgtatactggttttttatacagttatggtgggtggtgtatgcttaatggatttgctcgctatgctttgactgctagttcggttgccccagtttgcctgacattggcattcttagcttatattaatgataattataagattcttgtttcctcaattcttttggctgtcgtaagtgtggttttttgtgtctttataatcaagcaagcacaaaaatataatccggtcacattgaaaaacttagaatcggcatctccggcagataaggaaataaccaactatttcttgacttacttatttccacttatatctgggccgaccacttttatggattggcgattagccctgtttttttatttaagtcttttcttctacataaagcactcgtcttcgtatagtttcaatccaattttgtctatcatatttggattcaagttttatgaagccgaagatgacactggggtgagttttgttcttttgtcaacaaaacctcttaccaatgcgaagatcaaaggtttgagggtaaagaagcttactgaacatacctatatgattgtataa

SEQ ID NO: 96021 - DNA, 894 bp, Klebsiella pneumoniae BWH 28
atggaactttttgcgattacagacagcgaaataccgactagaataattaagattgacatagatgctcccgcacaaacggtagtagaaaatctatttagaactcagaggagtgagtttataaatgaagatatcgaagaaatagagttttgtgcatcttataatgttcaggatggtgagatattttccatcaatccatttgatgacgaaataggcattattaatgcaatcgaacggcctgatgctgttccagtttgggaccccgatgatgtgtcagttcattatttcaaagcgttatttacgggtgagccagcttcgaatggtaatcctactcaagtttggcttcaatgtttcgatagacgacaaataattaataatgaaaaatcctttttccaagtagtaactcagcctggaaatagattctcagtgtccactcgtcctggtttttcgcttagtgatcgattaactgctattcttgtgggtgataaattattgttcaagagtttctttatgctccggcgattttttaacatggaagagtattttaatgaagctactagagaggatttagataactttatcggtaatgatatatttcatgtggaaaatgctgaagattttatgatgtttgcagattctgcaattaaaaagaaagtatctttgataataagttctggaatactcaacgatcagcctattgaaaatctaattgagtgtgcccagaagattggatatcaattaggtattactaatgtgaatggtgataataaaatcactatgccaaactctaaaagagaagtgaagcaactattatatttccttgatcagggctacttcaattcaataatcacaaatgagttaatgttgacgaattcgaagcgaccaataagaatttga

SEQ ID NO: 96022 - DNA, 522 bp, Klebsiella pneumoniae MGH 48
atgaacaaaattgcaaggtttcttttaacagcaagttcgatagctcctgtaggtatcacgctgatatttataggatatatgaaaaacaagccatggcttatttggtggtcgttagggatctgtcttgctagttttatagcagttatttttttcctacactatgcaaataaaaacctcccttctctttataagaatgttgagaccatatctcctgcaaataaagaggttaccaattatttcttgagttatctattccctttattagggacagattcaatcgccgataaatggcaatatgcagtatttttctatatatctcttatcgtttatatatgtttctctgagaactataatttcaaccctcttatctccgctttaggatttaaattttatgaagcagaagacgatactggcgttggatttgtgttgatatccaaagaagttattacaaatttaaaaaacagagattttgaagttattcaacttacagactacacatttatgcatgtaacaagggaataa

SEQ ID NO: 96023 - DNA, 855 bp, Klebsiella pneumoniae MGH 48
atgatgaataaaaactctgctgtgaaagtgtatcgtattgataccgacagacaaacagacatcaaaatcaaaaaaatatttgatgaccaattatctctttttgaaagtcatcacaatacggaacttgttttcgaagccggatatacccctagctataatgaatgtagttatatagataactttgatgaaggaaaaatacttcttgatgcagttcagcgtagcaccgcaatgcctttgtggacaaaaaatgttgggcttaatgatataacagctttttttatggctcctgcgtatcctcaagtgaaagacaaaatagcaatccaaaccttttcaaaaaaacagatacttaacgagtcaagatacttatggctcagtaaaaattcatttacgatgtcagatcttttgggtttcaatctagacgataaattagttgcaatccttgaaggagataaaataaagttcaggaacttcaacaacctgagaagcatatttgatatgagttcttattttgctgaagcaacaaagcaagagatttctgactttgtaaaccaaccagtttttaatataccagtggggtttgatcttccagcccttgcagataacgtcataagaaaaaaagtcacattaataaacaaatctaaaatattggtaaatcatactgtaaccgaaataaaaaacgcagcgctaactttgaacttccctataaaaacgaccggctcaggaaactccgagaaaatagaaatgccaacaaataaaaaagaaataaaagagttacttaacttcttggatgaagactatttcaactctgaaataactaagcaaaggtttcgatcaaattcaaaacgtaaagcataa

SEQ ID NO: 96024 - DNA, 522 bp, Klebsiella pneumoniae MGH 44; identical to SEQ ID NO: 95728

SEQ ID NO: 96025 - DNA, 870 bp, Klebsiella pneumoniae MGH 44
atgagcctttttgcaatgatgaataaaaactctgctgtgaaagtgtatcgtattgataccgacagacaaacagacatcaaaatcaaaaaaatatttgatgaccaattatctctttttgaaagtcatcacaatacggaacttgttttcgaagccggatatacccctagctataatgaatgtagttatatagataactttgatgaaggaaaaatacttcttgatgcagttcagcgtagcaccgcaatgcctttgtggacaaaaaatgttgggcttaatgatataacagctttttttatggctcctgcgtatcctcaagtgaaagacaaaatagcaatccaaaccttttcaaaaaaacagatacttaacgagtcaagatacttatggctcagtaaaaattcatttacgatgtcagatcttttgggtttcaatctagacgataaattagttgcaatccttgaaggagataaaataaagttcaggaacttcaacaacctaagaagcatatttgatatgagttcttattttgctgaagcaacaaagcaagagatttctgactttgtaaaccaaccagtttttaatatacccgtggggtttgatcttccagcccttgcagataacgtcataagaaaaaaagtcacattaataaacaaatctaaaatattggtaaatcatactgtaaccgaaataaaaaacgcagcgctaactttgaacttccctataaaaacgaccggctcaggaagctccgagaaaatagaaatgccaacaaataaaaaagaaataaaagagttacttaacttcttggatgaagactatttcaactctgaaataactaagcaaaggtttcgatcaaattcaaaacgtaaagcataa

SEQ ID NO: 96026 - DNA, 519 bp, Enterobacter sp. MGH 25
atgaacaagttagcacgcttattattgaccgccagttctattgcaccggtttgcgccacacttttctttatcggatacgtaaaagattcaatatggctaatgcaatatagcttatgtgttggaattttaagctggttacttgcaattggactcataaaatatgcagaaaataggcttgaacttctgacaaagaatatcagctcagtttcccctgcgaacaaagaagtgacaaattatttcttaagttacctgtttcctcttttaggaaccgactcaatagcagaaaataaggcatacgctctattcttctatttatcattattgttttacatcagtttttcagagaactataactttaacccagttctttctttaattggttataaattctacgaagcagaagatgataccggcgttgggtttgttctaatctcaaaatcagtaatcacagacattaaagatataccatttacagttgttcaattaacagactacacttttctacatattaaaggataa

SEQ ID NO: 96027 - DNA, 885 bp, Enterobacter sp. MGH 25
atggcactttttgcagtaatggataacacaatagcaacgaggattgttagagttgagctagatagaacagccagctcatctgttacagctattttccaacagcaatgccaacattttgaaagccatcacaataataaaatcccattttatgctggatacaccccaaaatatgatgagtgctttgaaattcagaatttcacagattcggctagtttagtagacgcggttagaagaccgacagccataccaatttgggaccccaaccaaattgctatagataacatcaaagctttgtttgttggagtagttaatcaagctaactcgaacgttatagcacttcagcctttcaataaaaaacagattttagatacatcaaaatcatttttcggtaaatttgtcgcaagtaaaactacatttagtaaagctgatagcattggctttaatgttgatgataaacttgtagctgtaattgacaacaacactatacacttcaaaagttttttcaaacttagaagcatttttgatatgacatcttatttttcagcagcaacggaccaagaactaactacattcagtcaactaagtgttttttcaacacctcctggtttcgatctaaaaataatcgcagatactgttattagaaacaaagttaccttaataaatcaatcaggaatgttaactgcccaaaacctatccttatttaaggttgaagctgcaaaagtcaactttcctttacagacaaatgtaataaatggtgttgaaaaaatcatcatgccatcttctaagaaagaaattaaagccttacttgattttatcgaagaagatatatgggtttcaggaataagtggaagacgctttaagtcaagctcaaagcgtccaatataa

SEQ ID NO: 96028 - DNA, 603 bp, Enterobacter sp. MGH 23
atgaccccaaggctgccgtttgcgtttgctgtatttctgggctcatatttgccacttagtatgatcctgctcattcaggattttgatgacagtaaatataaaaggcatctttgctttgatttattgacatctgactcctgtaacctgccgtttaaggaaccattactgtccgtcagtttatttctcatctgcctggtatgttttcttctttcatggcttatattaaaactggctaaaagcgatgagcaaaaaatcaggattctggaagtaaagtatacgccgtcagacctgatgaactatgttctcccttacattgtttcgttcatgagcattaattaccaggagaccaacaaatttttggggtttattgtatttcttctctggctcttctggctgtcttataagaccggacaaataatacttaaccctatacttatcgtattcaactggaaaatgtatgaagtaacttatcgacatccaggtagcaaaaagacacactcaggtgtggtattatcaaacctgagtatttcccctgattctgattacgaatatcagacaatacagtctgtcattattattagtggagataaggatgaaacttaa

SEQ ID NO: 96029 - DNA, 915 bp, Enterobacter sp. MGH 23
atgaaacttaaagaattacaggattttgatatccagagtgcaacactttctgtctgggtgttcaggaaacagacagtaaaaagtaactcggtatacagggggaaatggatcactgttgttcctgaactcaaaactgaactgacggaatttatttgtgctgaaagaggaaaatacacggagactattgagtattcactgctggcccagaacaatgaagccagcctgatgctgattggttccggagaaacctctgcggttgcaattacagcactatctgcggaccagacacaggccagaaaagtaaaagaaatcaaagaactggcgaactgtgatttttactctgtgaaactggtgtccggagatactgtactacattgtgtcaaaaaaacagatccatcatgggcaacgaaaaaacaatccggattacgatctgttgttttcaaaaacaataaattaaaaatagatgacacccctcgttttaacatagcaaaagattttgatttttatattcttggtgacaatgttttcatcaaaaacaaaaaaacgtttgaatcccttctgagttataaaaaagctcaccttactaactttaacgatctcgttgatgaaccagaattcagtcagctctttaccgatgccgagccactaaaaagatatgtcggaacaaacgcaatgcagctaagaagagcatcggccataaaagaaaaaggattctataagttaccggagtttatggcaagcctcagggaacatgcctcgcggttccggctgaatcttcagtttgatgaacagggcaggattattgccagtgatgcctgctgtgccgatatatttcaggccctgcttgaccatcgcctgcagtcacactttgccgcacatatctacgatgttccgaatgcgtcaccaattcagtaa

SEQ ID NO: 96030 - DNA, 594 bp, Enterobacter sp. MGH 23; identical to SEQ ID NO: 95890

SEQ ID NO: 96031 - DNA, 972 bp, Enterobacter sp. MGH 23; identical to SEQ ID NO: 95891

SEQ ID NO: 96032 - DNA, 591 bp, Klebsiella pneumoniae MGH 20
atgaaaagcaaaggcacatttaataagatagggttgtacatactatctttaatgctgttgtttgtttttattatcatcttaagtgcaaaaattccgatctgttatggtgactcatgtgaatttataggtttttataaattagccatcgacaatgtaataccaataatctgtttcttttttatttttttagcatgctatttttataagaggttccgctcattaattaaaattaacaatgctgacactgttacaataacatcctgccaaagtgagaattatgaaagcttaacttttttagctacgtatatagttccttttatggggttcagtttcgatgacattcagaaaaatattgcttaccttttgttagtaatagtcattggtttaatcttcattaaaacggataaatattatgcgaaccctacgctagccatttttggatacaaattatatagagttaatatttcttatacaggaagcgttgaagttaaaaatgttattgcaatatccactgatattttagctgttaacgaccaagtcttttacagttttttagatgattatgttttcatagcaaggaaaaaacaatga

SEQ ID NO: 96033 - DNA, 960 bp, Klebsiella pneumoniae MGH 20
atgacccctgaaattcttaagcgtgaagtttctgatatcctcgataactttactggcatcagaattattttcgttgtgaagattgaggatagctattctttaaaactatcaaaaattgaagcagaggctctgccgaaaattgttgaaggatttaaaagaaaaatcgaagaggatatattagataatgatgatttgaccatacctttcttatcaaattttgatgatagaaagaatgctctatttaaatttgattatgaggaacaacctaaagaatttggatttattaaaagtgctacagccatcccccctaactcgcaggatttttatgatttgaggaataaatttaccgatgttaaagggataataattcaattacgtggaaataataagtgtctatctttgtataaaaacaaaaccaaccttaccgtgtttgaacaaagccgtaaattattcaacttgatacctgattcggatggttacttgaaagagttaccaaatcaagtatttagattggattacaactacgaccttgtcctcttggataatgattttttaataaaaaaccagaaaactctcgaagttacaatgcaattccaccaagttattgaagctcaggcaactgtcgctctggaatctttaaggtcgtcatcattaattgatgacctttctcaccttgaaaaaagcgcaaaagaaatctctttctcgagaaaacttgccaaaatctcaaaacattcccctgttttaggaaaaattgatgtcccagtaatcatccattatgttagtcatcatacttacttatctacagtattaattgttagtgaggatggtagaaagctaattatcaagactaaagaatctcaaaaacatttcataaaattattaagtgatgattatcttgaatctcctctaacgaaaattctctacgactcactagctaaagatgaattaaaaacaaattaa

SEQ ID NO: 96034 - DNA, 534 bp, Asticcacaulis sp. YBE204
gtgcttagcaaattggcgaagctcatgctgacaggaacatccctcgcgccggtggctctggtttacgcctgggtggtgtacacggatggcaagtcgttggtggcgctggcgttggttgccttagccattgtgctcattgttatcatggtttcactgctgcgttactgtcgcaaacatttggagcgctccaaattcaaagtgacatcaattgaagcggcagaccgggaatatatcaccttcattttgctctatctttcgccgttgttcacggcgcaatttggcgatctcaactggcatattcttattccgacaatgatcatttttatactcgtgatcagtactggctatggctaccattttaatccgctgctggggttgcttgggtggcatttctacaaagtgaacaccgatgaaggtgtagcctacgtgcttataaccaagatggaattacgctccgctcgacaatgcctgactgtcgggcaattgaccgaatacatcgtcattgatctttcagataacgggaggtcggcatga

SEQ ID NO: 96035 - DNA, 861 bp, Asticcacaulis sp. YBE204
atgacccttctggcctattgcaaaactaacaacgggaacgcggtcaaacgtatccccatgaccaacccggttcagaatggacttgaagcgctcttccttaatcaggaaaacgccttccgtgccggacgcccaaacgaagtggcctttgacggggattggaaccccgacgaagatgagcttctgaccctcgtcgtttcgcaggaagttgccaacatcattgccgttgcgactgggaacgcattggcattgccggttattgataccgcacactttgaagcggaaaacatcagggcgttgttcaccgtggctggtaacgatggagcgcagcgactgctcgtacagcgttttactgggatgcagttgctcaatcgcaagcgcgctttgctgctgcatgaaaacaatttccgtgaattgaccgagcctgcctttacgttgggcgccagtttgtgctgcgtcgttgagaacggtctaatcaaattcgacagctatcataatctgcgtgccatttttgaactaaccgagttttatcaagaggccaccgacgcagacatcgatgcgattgcagctcatgcttctatcaacatcgcccacttggctgcgttcaaggaagaggcgacgcaaacgctgcgaaagctgatacacaaagtcatgtattccggtgttctggatcagcacacgtcgcaggaaattcaaactagggccgccgcgaccgggcttgctttggttctcgacaacggcattcttcaagtgcctgaagacaaggctctggcgcgtcagtttttccggtttctggatgatagcctctatgaggcaccgctgagtggtcagcgctacgtcaccaattccaagcgcgcaatttag

SEQ ID NO: 96036 - DNA, 582 bp, Methyloglobulus morosus KoM1
atgcaatttcgaacagtatccgctttcttggtatttattggatcatacctaccacttgcaataatcctggctgttcaggatattccaagtacgtggtggtctttaccattctgtaactttataaatttagatattgctaattgctcgttcattccatttaagaatccaaagccatcgttaatttttgtttgtacttgtaccttgtctgttgttgtttcaagctttctttttagaaaaatatcttttccgtttgttgtcgatgtccaagaatttaaagcgatacctaatgacataattaactatacatttccctacgttgtttcgtttatgggaattagctatgacgaaaccgaaaaactctttggatttggtgttttcctattgtggatgttcgccattacctataaatccggtcaaataatcatgaatccactcctcttgatgtttggctggaagttatatgaagcaacggtgctgataaatggggttacaaggcatattcaaatattaaaacaaggttcgattactcgaggttcgctagacgttcagacaattcaagatttctatgttgcgcgagactag

SEQ ID NO: 96037 - DNA, 915 bp, Methyloglobulus morosus KoM1
atgcaggcagaattcgactcatttcgttcatttgattttcaaaatgccaatgttcatctttgggtgtttaaaaaaagttcgtcagccagaaagtacacagctcattttgttcggacagatcagcagttaattgaattattaaaaaaccttgtcataaatgagcttaatagaataattgagttttctgcgtatacatatcttgcagaaacaaatgaaaatagttgtttagctgcacctaccgatgaaacggattttgattacttaaaagtccaagttgatcgtcctgaaccagaatgtgaagttcgaggaatcaaaaacttaaaaggtgcagagggctatttagtaaagttcacagttaacaatgaaactatctatgcagttaaacgctcgacctccacctggaagacatcttatccaaagaaattcataaacatagtatttcgagatggagaacttgcagcaacaaatgacaatgctttttccatagaaaaaaactttgatttctactgcaagggagcattattgttcattgcaaataaacggggatttgagtctgcactagaacacagggccgcctatattcaaaatttcgcagacctacaggctgatcctgcattttgctctctattcactgaccttcaaccgctaatcggttatgttggaagtaattcaattcagcttaggcgcatggcaattgtagaacaaaaaggaatctactctaggccaaattttctaactactttaagtcaagttagcgccaaccggaattggggaataaacttcgatccacataccaataaaattattgcatgcgaccatacggcaaagacaattttgcaagtgctgttggatcatcgtttgatgagtgaaatcacaagtaatgtgtacgatgttcctgatgcgactcaaatttga

SEQ ID NO: 96038 - DNA, 603 bp, Escherichia coli ECA-727
atgagagataattcaaataaagtaaaggggtatgtaagacgtaaagttgatttgtatattttgtcattagctattttattttgtttttttatttttattacaataaaatttcctgtgtgttttggggctaaatgtgagttcattggctggtctttgctgttgaaaaataatattgttcccttgatttgcgtagggttgcttttatattgtggggtggcctacaaaaggtttcaatatgacacaaataaaagtgtcgaacttccaatgaaaataacaaaaattgaaaaaataaattatgagcaccttacctttttagccacatatattatcccattgattacatttgattttgaaaaagaaaggtatgtgatcgttctagcagttctcttgataattatgggtattatttatattaaaacggatttgttttacgctaatccatccttggctttattagggtttaatatttataagttggatgtgagtataacaggaggtattaataaaacagggctaatattaattactaggcgacagttaaaagaaaatgacatgataagttatattgtgcttgatgaaagagtttactattctggagattaa

SEQ ID NO: 96039 - DNA, 516 bp, Escherichia coli ECA-727
  modified_base (499)..(499): a, c, t, g, unknown or other
atgtcaccgcagcaattggataaaaaaggcttggatgataatctaagttattatattaataataaagatgatatttctgttattgtttatgccattctaaaaaatagccctgttgcatatcgaatggatatagagggaagcgctcaagatggcctcaaagaattatttttagaaagtataaaaaataatatcattgataatgatgatatcagtattttacctctttcgtcagcagatgaaagaaataatgttatttatcattacgatattgaatggcctgatgagttaacctccatgcaaagtatgcttgggcagcaaggggagagtgtttttgattttaatgtacaaaatattgaagatattagagtgttgctaatttgtattggtaatgtacaacaacaaattatactctacaaaacaatggctccagtcaatattttctctcgcctaggtttttttctaaaaaaatcagcaacaagacttgaggaaattgaagatntatttttttcgagttag

SEQ ID NO: 96040 - DNA, 645 bp, Escherichia coli ECC-Z
atgaagtatatcagttatgatcgtaatagtttcatgatgggagtaatcaatatgaggaatagtggcggaggcatgattttcagaaagattaatttatatattctttcattatcactcctttttttcttttttatagttatcaccatagatattccaatctgttttggtgataaatgtaagtttataggttttgaaaagttaatatctaataatgtcgtggctattatttgtgcactcctctttttatatagtattgttgcgtattttaagtttaaatatgatatcaaacaatcaaccgagattccttttgaagttgtgaaggttgaaggtataaattatgaacatttaacgtttcttgcaacctatgtaattccattaataacatttgatttcgaaaaaacaaaatacataattgttctagctatgttgctggttgttatggggattatttatattaaaacagatcttttttatgctaatccttcattagcgttgatggggtttcatatctataaacttgatggtgttttcaaaggaggggaaaaaagagatgggattatagttataacaaggaagaaaattaaaatgggcgactcagtaaaatatataaaacttgatgatagagtttactactcaggatattaa

SEQ ID NO: 96041 - DNA, 996 bp, Escherichia coli ECC-Z
atgccagatattatatatgataaagaaacattggatcgtaagtttcaatattttatcgataatcaagcacagctaggaatagttgtctacgcactcacgagaaattcaaatacccccaaaaaaatggatattgatccagatgctcaacgcgggctcattagtctttttatggacaatatccgagacaatgttgtatcaaatgaagaattgtcaatattacaactttcggcatcagacgagagagtgaaggtcatctatcaatatgatcttgaaatacctgaggagttgagagttctcgatgaggtaagacagactgatgatcatgagttatataatattgccacagagggtgtgaataatattaaggtcttacttattgagattggtgatgcgagagagcaaatggttttatataaaaccatggcccccgttaatattttctcaagaagaaatttctttctaaaaaaatcaagaaccagattcgagaagattgatgatgatttttttaggattagtgataactttcaattgctaagattctctgatgggttatttgtatttgatttggatactatagaaaaatcatttggttttcatgaagtgattattcgcgaggccacgtctgggatggctgcaatagaggctcgtaatatagtttcaaatattgaagcattagcggagcttatccaagatgtaagatatgcaagaaaattaacaaaagttgcaagagcctctccagtaattcagcggggtatcgaaacggccaaaattataattttctgtaagaactaccctatgcttaaaggtaaaataagatttaccgaagatgggactcaaattcttcttgatacgaaagtgtcaaaggatttatttataaaattattgatggatgacttccttatttctgagcttacagaaagttattacaacagtatagcgaaagacacagttgaggtagctgtggttagagctaatgctgaaaatagccctgcttaa

SEQ ID NO: 96042 - DNA, 522 bp, Mesorhizobium sp. L2C054A000
atgttcaatgtttttgccagactagtcttcacaagcacggccctcgccccggtcggattgacctatgcttgggttgcgtgggttgaatgtgcgccccagacggcaaaattcatcctgacaggctgcctaatcctttgtgtcctatgcgtcgggattctctggagcgctaaacgctcactgcccgcgtctaaattcaaagcagcgtcaatcgaggctgcggaccatgagaacaccgcgtttctcctcctctatgtaatgccgctattcacgtcgcaattcaacacactagattggaaattctgggtgccaactgtcgcaatatttggcgtgataaccgccactgggtacaactaccatttcaaccccttgcttggcttgcttgggtggcacttctacaaagtccaatctgctgaaggggtgactttcgtgctgataacgaagaaacatcttcgcactgccgccacggaattgcaggtaggccagctcacagaatacattctgctcgatctggggggaaaataa

SEQ ID NO: 96043 - DNA, 870 bp, Mesorhizobium sp. L2C054A000
atgactcaactctacgccgtatgccgtccggccgagatagccgaagtcagacacattcaattggccaatccgctgcaggcccaactaaacggggtgttcgaaaaccaagaagctcaattcatggccggcatcgccaacgaaattgcattcacgggcgattggattccagacagcgaggatgtgctcttcatccaaagcctgccagaggcacaagcgctgctagctgcagcggaccagaacgcggtcgcacttcccgtactcgatgtcgccaattttcaagatcaatccgtcaagggcctattcgccgtcctcggcaatggcccaaatcggcggctcttgatccagaactttggcccgcaacaggtgctatctaatcgtttcgcgtttttatatgagggcgatgtttttcgacggctcgtcgaaccggcattctcactggataataaattggtagcaaccgtcgacgcgataggactggtccggttcaagagttactccatgttacggcgcgtcctcgatatgtcccctgtcttccgagacgcaaccgatcctgagctagctgcattttgcggccacgctagcctcgccatcggggatgctgcggcgttcgtagccggagctgatgaaggtatccgaaagcacgttcttgcaatcacgaagaccaacgttcttggaaatcacccggtcgcaaatattcaggcgcaggcagtggctataggatttccaatcgccgtaaatgcaggccgtatcgagataccagccgatcgaaaaggcgcaaaggctctattcagtttcctactgaataaggtctatctcgggcctatcgaccaacagctcttcataaccaattcaaaccgacctctggcctag

SEQ ID NO: 96044 - DNA, 522 bp, Mesorhizobium sp. L2C089B000
atgttcaatgtttttgccagactagtcttcacaagcacggccctcgccccggtcggattgacctatgcttgggttgcgtgggttgaatgtgcgccccagacggcaaaattcatcctgacaggctgcctaatcctttgtgtcctatgcgtcgggattctctggaccgctaaacgctcactgcccgcgtctaaattcaaagcagcgtcaatcgaggctgcggaccatgagaacaccgcgtttctcctcctctatgtaatgccgctattcacgtcgcaattcaacacactagattggaaattctgggtgccaactgtcgcaatatttggcgtgataaccgccactgggtacaactaccatttcaaccccttgcttggcttgcttgggtggcacttctacaaagtccaatctgctgaaggggtgactttcgtgctgataacgaagaaacatcttcgcactgccgccacggaattgcaggtaggccagctcacagaatacattctgctcgatctggggggaaaataa

SEQ ID NO: 96045 - DNA, 870 bp, Mesorhizobium sp. L2C089B000; identical to SEQ ID NO: 96043

SEQ ID NO: 96046 - DNA, 522 bp, Mesorhizobium sp. LSHC416B00; identical to SEQ ID NO: 96042

SEQ ID NO: 96047 - DNA, 870 bp, Mesorhizobium sp. LSHC416B00; identical to SEQ ID NO: 96043

SEQ ID NO: 96048 - DNA, 522 bp, Mesorhizobium sp. LSHC424B00; identical to SEQ ID NO: 96042

SEQ ID NO: 96049 - DNA, 870 bp, Mesorhizobium sp. LSHC424B00; identical to SEQ ID NO: 96043

SEQ ID NO: 96050 - DNA, 522 bp, Mesorhizobium sp. LSHC426A00; identical to SEQ ID NO: 96042

SEQ ID NO: 96051 - DNA, 870 bp, Mesorhizobium sp. LSHC426A00; identical to SEQ ID NO: 96043

SEQ ID NO: 96052 - DNA, 522 bp, Mesorhizobium sp. LSHC422A00; identical to SEQ ID NO: 96042

SEQ ID NO: 96053 - DNA, 870 bp, Mesorhizobium sp. LSHC422A00; identical to SEQ ID NO: 96043

SEQ ID NO: 96054 - DNA, 615 bp, Escherichia coli UMEA 3489-1; identical to SEQ ID NO: 95636

SEQ ID NO: 96055 - DNA, 1023 bp, Escherichia coli UMEA 3489-1; identical to SEQ ID NO: 95821

SEQ ID NO: 96056 - DNA, 591 bp, Prevotella oralis CC98A
atggtaagttttgttcctaaatttttgtttacagctacggtaacggcaccagtattcttgtcacttggattaattggcatcataaaggatagtaagaattattttcaatcttggaataatctgttagaaaataacataatccctaatagttttgaatggtggagcataaatataagttttgcatttatgctaatatgccttattgacattaagatattccttcgcaaaaaatcttgtaaatgtgggaaaggaaaaacgattaaggtacagtcttattcaaatctgtctcaaaacagtgctgagcaggtaatatcatcaataattccttggctgactatatttgctgaaagacttgattttatagtattatttgtgtgtataatacttcaatgttgttttattgcaattgcaagttataataacaataactataatttactgtgttcaatatggggatatcgttattatgaggtaaaaacggaagaaaacacatatattcttatttctaaaaaatgtattagaaataagaatgaaatcaaaatatttgttgaggtgacagattatatgggtctaatcattaatgataaataa

SEQ ID NO: 96057 - DNA, 522 bp, Prevotella oralis CC98A
atgttacaacgtaaaatggtcttacagtttgagcatgggaacgtatttactaaaatgaataacacagcttttattgttgaggataaagttcatgctatatacgaggatgggaagttatatttccaaaattatacaattgcaaatcagatattttcattaatagatttcattaccgaagccacaaatactgaaattgaatcctttggagagatagaaggcatcaatgtaagtacagaaaacataaaacatattgcgaatataaagactcgccgacttataaaattattatccaatacagataatattgcaacttttatgagaaaggcatctcaaacaagaactagtcttttaaggaaatatggagtaaacgcacaaatcaacgaaaacaatgaattagtattaccaactaataatgttgcagatttgaatcgcgtcttggaatttcttaatgaagatatatttagaggagtaatcaccgatagcctttaccgatcaaattcaaagaaaaaagataatcattaa

SEQ ID NO: 96058 - DNA, 573 bp, Escherichia coli DORA_B_14
atgaccacggactttatgtatactggttttttatacagttatggtgggtggtgtatgcttaatggatttgctcgctatgctttgactgctagttcggttgccccagtttgcctgacattggcattcttagcttatattaatgataattataagattcttgtttcctcaattcttttggctgtcgtaagtgtggttttttgtgtctttataatcaagcaagcacaaaaatataatccggtcacattgaaaaacttagaatcggcatctccggcagataaggaaataaccaactatttcttgacttacttatttccacttatatctgggccgaccacttttatggattggcgattagccctgtttttttatttaagtcttttcttctacataaagcactcgtcttcgtatagtttcaatccaattttgtctatcatatttggattcaagttttatgaagccgaagatgacactggggtgagttttgttcttttgtcaacaaaacctcttaccaatgcgaagatcaaaggtttgagggtaaagaagcttactgaacatacctatatgattgtataa

SEQ ID NO: 96059 - DNA, 894 bp, Escherichia coli DORA_B_14; identical to SEQ ID NO: 95795

SEQ ID NO: 96060 - DNA, 585 bp, Enterococcus faecalis DORA_14; identical to SEQ ID NO: 95614

SEQ ID NO: 96061 - DNA, 915 bp, Enterococcus faecalis DORA_14; identical to SEQ ID NO: 95595

SEQ ID NO: 96062 - DNA, 648 bp, Photobacterium leiognathi lrivu.4.1
atgaaaattagaatgtatctcttatcaatgctgtttttatttatacctatcacgatatatttttcaggtattgataatgtatggtctatttttgataaggctatgtcttcttgttctggtatggataacatatctcaatgtgtatacaactattcaaatagcagactcacattttctacatggagattagtaatctgcggggctttgattttaacttgttcttatacatacatctggtatctaatgattttgaaaaacttagaagctggtatcgtatcaaaaaagttaaaggttgtttcatgtaaaaaagaatctggtgaatacctttcttttttatcaacatacataatgccgttagtatttactgacttaagtaaaccatcaaacatagttaattttttgttcgttttgattatcgtcggatttttacatatcaaaacgaaaagaattcattgtaacccaacattgtcattatttaatgtttccgcttataagattacttacagtgtgatagctaatggcaaggaaaagacgcaagataaagagttaatagttttatctaaagatttaataagagaaaatgattttatcagggttataaatcatgatgattatttaacgtttgcgaaaaaaatcatagaggaatga

SEQ ID NO: 96063 - DNA, 1137 bp, Photobacterium leiognathi lrivu.4.1
atgagtgctgatgccttagatcttgatactttagagcacaataaagaaaaagcacaagagcttttagagttatataaacattttgattgtcatgttgataaggttacattacatacctactttaactttaaaaataaaagtaaacccggcggtaaggacacttttagctataaaattgccagcctaaaaaatgacacagagctaaaacaatccattattgataatgtgataaagaaaaccatatctgatatagaaagtcaggttgtgatggtatctgatattaatgcactgagtgaccgtgccaacaccatttcatttttaaataatgcagaacagtatgataatgagcaaatgaagtttctaactggtattgtgtttgatgccgggtttggtggtgatggtgaagatgatatccctgttgtaaattttgacactgtagatcaaatcgcaaaagttgactcaatcatttttgttttgagtaaagatgatgacgatcagtgtatcactatatacaagaaacaatatccaattcaaaacttatcaagaaagaaaaataatttttatggatttagcaaaacagagctaactcgagtagataaagatatgatttctattgatggtaaggcatctcttgttttttctggggatacggtctttatttacgatcaaaatgttttcgagcgcttttttggctataaagcatggataaaaaatgccgcctctgagtttgttgactccatgtcttctcgttttgatagttttgttgacttaagcaaatttactgaacgagtagataaagatagtcatgatgcggatgctttttctagaaaattagcaaaagtatatgctcgaaacgaaacaaagcaaacgctacaaacaataacaaataaacatcttcagagagttctagatgaaaatgaatatttagctggtgtttttaagtataaaaaaggcaatgatactattcgcatcgaaacccataaccagcaagatacttttatagctatggtatctgaaggcgtattgagatcgttgattacaggcattgattatttaagcctaggctcaaagcggaaaataccatcagcaacatctacagctagaactacttcggattcctcttccgtagtagcgtga

SEQ ID NO: 96064 - DNA, 594 bp, Gluconobacter frateurii NBRC 103465
atgcagctcaaaaaaacttcggcctttgccctctacatcggttcatacttgccgcttggattcattctctttgttcaggaccttgatcctgaagccctaaaggccggattatgtcgcccctctaattggagcataaagagctttcacttccccctgctgcacccgtggtggtcctttggaacggttgggctgggaatcatctgctttctggtaacgttgtggacactacgttcagttactacgccgaatcggatacaagtggttgaagccaagcacatccctgcggatctgattaattacgcaatgccttacatcgtgtctttcatgggaattgatttcgcatcaccaatgaagatgctcgggttcgccgttttcttcttatggatcttctggatcacctatcgttctggacaaatcatcatgaacccgattttgatcgtatttggttggaaattatttgagatcaaatataactttgtccaaagtggtgatcagttgataggtcgagctttatctcgcgaggatatagagcccaacagaatgtatcggcgaggcagcttacaagacgtgatgatcgtcgatggggtagagtaa

SEQ ID NO: 96065 - DNA, 930 bp, Gluconobacter frateurii NBRC 103465
atggagagattagtgcctgtactagatgatctaaaatcatttaacctcgttgaggcggaccttacgatctgggtctacaaaaaatcgacacgggatggaaatcccgtgttcaacggccgctgggtaggcatcacccagaatctctccgatacattgcgcggcgcggtctcacaggcgctggagaatgtgaacgaaacaatcgaatacgacatacttgcgcaaaatcacgagaccagtgtgctcacgcttggagcagacgagacgcatattgggctaatcgagggacaggcggcgaacccaacggaagcacgaaaggtcacgcgccttgagcagatcgcgaatgctgaattttatatgctgcggtttgcctctgacgctggcgttctgttggctgttcgaaaaaccaacgctacatggaaaacgaggcgctcgtgtaatgcattgcgcgccgtattccaagacgaagagttggacattgacacacgcccagctttcagtcttgagccttttttcgacttcttcgtttttgacggggatgtgttcgtatcaaataaggcacggtttgaatccgtgcttgcctaccgcgcggggcatacggaagcgttccatgatttagtcaatcaaagtgagtttagcgatatcttctccgaagtcacgacaatcgctgagttcgtagggaccaacaaaatccagttgcgacgagctattgcgatccgcgagaagggtcactttagggatcccaattttatggaaaagttgcgcacgcattgcgccgagatgggtctaaatattgatttcgacgacgagggacggattgtgccaaagcctgagagttgtcgcgatatttttcaggctcttttggaccatcgattggactcgcgtctgtcccagcgactatatgacgttcaaagtactgagcaagtgggctaa

SEQ ID NO: 96066 - DNA, 516 bp, Enterobacter cloacae P101
atgcttaattcatctgcgaaatacctgcttacggccagctcagttgctccagtgtgctttactctgtcttttgttgcggtagttaataagcactatccattcgcagccttcagtctcggtatagcgatgatgagtttcttcttttgctggtttatcataaagttaataagaaagcacatcagtgtgacccacgttaatttacgctctgtcaagcctgcaaataaggagataactaattattttctggcttacctttttcccttgattaccgatgacaagcttatttcagactggtacctggcttgttttttttatattagtttgtttttctatgtcggtttttctggcagttattcttttaatccactattaaccttattaggttacaagttctacgaggctgaagatgatacattagtttcatttgtacttatttcaaaaaggaaaattcaatatggacatattgatgatctaaaagttgttcaagttacagattatacttatttgataatttag

SEQ ID NO: 96067 - DNA, 870 bp, Enterobacter cloacae P101
atgcaccttttcgccctaacagatgaagacctttctcccaatatttataaaattgatgtagataaaaaaacttcagatattttaaagaaagcgttctctgacatggaggttgattttaataacacgcataatgaaacaatatcatttactgctgactataaactcgaaaaaaatgagtttttcatccttgatgactttaaggagcatggtgcattaaaaaaagccttaaaaacacctaaagctgtgcctaatcttcacattgaccgtgtaccgctgaataaaataaaagcattgtttacaggttctactgatggcaataagatagtcattcagcgttttgacaaccgtcaagtgcttaccccctctactatgctcttcctagacagcaaagaaacctttacacatacaagttatggtgggatttctattggtgcaaaaataactgctttgattcacaatgatattattacttttgggaactttaactctctgagacgcgtgttcaatatggataaatattttcgagaagcaacagatcctgaactggatagttttcaggaaaatggtgtattcgctattgaggatgggttcaaactctctagttttgatgatacaacgatcagaaggaaagttacacttcttaaccagtcaggcattttgggagttgataatattccagccttgattgctgctgcacaagaactaaagcatcccctggatattattgaaacttctacaggtgcacgtatcagtatgcctattgaaaaaagaaaggttaaactccttctgaattttctggactcagacatttatatatcagcagtgaatggtaagaaatatcgctctaactcaaaaagacaaattgattag

SEQ ID NO: 96068 - DNA, 519 bp, Serratia marcescens subsp. marcescens Db11
atgaacaaattagcaaggttactacttacagcaagctctattgcccccgtgtgcataacgctaattttcatcggttgggcgacagattctacgtggctagtgaaatatagtctgttcactgccttagtaagttggattctttgtatagggttagtaaaatttgcagagtcaaaattggaaactttacataagaatattgaatctctatcccctgctaacaaagaggtaactaattatttccttagttatctttttccattattaggaacagactcgatagctgaaaaaaaagaatatgcaatcttcttttatgtttctctgcttttttatatttgcttctctgagaattataactttaatcctgtattatcgttacatggctataaattttatgaagctgaagacgatacaggagttgggtttgttttgatatcaaaagaagttattacagacatcaaaggaaaaaaatttcctgttgtcaaactgactgactacacttttttacacgtaacgcggtga

SEQ ID NO: 96069 - DNA, 888 bp, Serratia marcescens subsp. marcescens Db11
atggccttattcgcattaatggattctaatgtagcgacaaaaatcctacgcattgagttggacagtaatgctagttcaatgataaatacaatttttaacgaccaaaaacttcattttgaatctcaccatagtacagtaattgatttttatgctggctacactccgagctataatgagtgcttcaaactttctaactttaacgaatcagcagcacttattgatgctgtgaccagaaacaccgcgattcctgtttgggatccaaaagtgattgatgtaaatcatataaaagctctattcgtaggtattgcctcctcacaaaataataatctcatagcgatacagacgttcaataagaagcaaatactcgatacttctaagtcatttgttatgaaattgattggttctgccaatacatttagcaaagcagataacgttgggttcaaccttgatgataaacttgttgcaataattaatggttccgatatttttttcagaagctttttcaagctaagaagtatatttgatatgtcaaattatttcgcggaggcaacagataaagaagtaaatgactttgctatgcatagtgtttttgaagtcccacttggatttaaactggatacagttgcagacactgttatcaggacaaaggtaacactcattaacaaaagtggaacactgaacaatcaaacaatttcaaaacttaaaatggcagcaaaaaagattaactttccattacaaacaaatcttactggcggagttgagaaaatagttatgccgcaagaaaaaaaagcaattaaagcattactggattttcttgacgaagatatatttacatcggaaataacacaaacaatctacaaatcaaactcaaaaagaaagtatagctaa

SEQ ID NO: 96070 - DNA, 570 bp, Paenibacillus sp. FSL R7-277
atgagagataaaatagaactttatattatctcgttatggcttctttttgttttgattatcattgcaactattaatatacctattagcttcaataaaaatgcacagtttattggtttcaagaaattatttgaaatgaatttcgttccactattatcattactattccttcttttaggactagcttttataagtcgatttaaatataagctttctggaagcctgaaaacctttagagttaatgaagttcagaatggaagctttgaacatcttactttcttaacaacttatattgtcccactcattagttttaatctagatgagtcaaggaatatattgatattgctaatactactattagctataggagcaattagtataaaaacacaaatattttatgcaaatccaaccctagcacttttaggttttcatatttatattatttcaggaacctttcgaactggagtaagacaaggaattattgtcatatctagagacaaacttaattctggcagtacagttaaatatcgtaggcttgatgaaaaaatatattttgcgaggttaatgccatga

SEQ ID NO: 96071 - DNA, 972 bp, Paenibacillus sp. FSL R7-277
atgataaaagctgatcttattacattgttgcgcgaaacgttaactaatgaagaattaattattgctgaactttattttgttcttaaacaggctcaaaatatgacacttcgccttatagacattgatgaagaaactcaaggagatcttactaaacaatttattgaaaaaattaaagctgatttaatagaagatgaaactttagatttagttagtatttcaaactcagatgaaagagaaagagtaatctacgagtatgatcttgatgaagtaccagaagaaataaagttaattaatgcaattattgaggatgaagacatacttgcatttgattttaaaaaagatgaactaaatcaaataagaggtattgtcgttttaatctcaaacaataatcacaatcttttgttgtacaaaaaacactatccagtaagcttgataaaaaaagataatacatttacttttaagcgtatcggaaatcataaacgctttgtgaacgtggaagaagatctcatcagaattaacaccaatttcgagttttttatgatagatggtagtttaataattaaagatctcaaaacactcgagaaattctttggttttcatgaaataattaaaaagaaggctcaagaatgtattgttgcaattgaacaatcaggtttacttgaagattctaatgtattacaagagctaattgatgatatttcttattcacgcaaactaacaaaagttttaagttcttcacctgtactcaataaaattccgactccatcaattattgcttttactgatatctatcctgcactcaaaggacaatttcaatataataccgataaaagcaaaataatgttatctactaaaaaagcaaaacttttatttgcaaaattattaaacgatgattttttgcagtctgaattaaccaaaatgttttatgacagcttggcaaaagatactattttagaaactgcttcaagttaa

SEQ ID NO: 96072 - DNA, 480 bp, Chryseobacterium indologenes NBRC 14944
ttgaattttggaggttttagtcaagaaagtgtatttctggctttagcaaaatttgggttaagcgtttttctttttcttactgcaatattcggttatatagggctgaaatttttattgataaatttagatataaaaaaatcaaatggagagcttgtaaaagtcgttgaagtagaaaacaagaatagtgaaagcatcagttacatctcaacttacattgttcccttcatcttccaagacacaaataacttatttgacattacgtcgattttcattgtcttgataatcatatttttcatttatacaaaatcaaatatgattgtaataaatccaatattgagtattactcataccctttaccaaattgattacaacaagaagagccaaacaaaaaaagctcttttgataacaaaagatgaagatttggaaagcgggcaagaaataaaaataaacttaattacgaaaaatatttattatggataa

SEQ ID NO: 96073 - DNA, 1020 bp, Chryseobacterium indologenes NBRC 14944; identical to SEQ ID NO: 95589

SEQ ID NO: 96074 - DNA, 615 bp, Escherichia coli BWH 40; identical to SEQ ID NO: 95636

SEQ ID NO: 96075 - DNA, 1023 bp, Escherichia coli BWH 40; identical to SEQ ID NO: 95949

SEQ ID NO: 96076 - DNA, 588 bp, Methylophilaceae bacterium 11
atgcaattaagagtaatttcagcggcggtaatttatataggctcatatcttccattgagcgtgattctcttgtgtcaaaattttgataaagatatatacaatctaggcttctgtaatccgtggataatttttgccacagaatgcaagcttcctcttaaaaaccccatatttgccacttcttttcttatagcgtgtacattttgtttcttcattgcaattttcacactctataaagtagatccgaagaagaatataaatatcattgagtccaaaccggtgccagcggatttaatgaattatgttctcccatatattgtgtcgttcatgagtttagattaccaagacacaagtaaatttgtaggttttacaatatttatactttggatattttggattacatataaatcaggactaattattctcaaccctctattcgtagcttttggttggaggctatacgaaattaagtatagctttgccgggagtggcgatgaattttacgctacagctctttctaaaatcgagctttcgccaaagcagaattgtgctcaagaaacaattcaggatgtattaataatcaaaaaataa

SEQ ID NO: 96077 - DNA, 936 bp, Methylophilaceae bacterium 11
atgtcggctgacttggatttattaaaagggtttgatctagcaaatgcaactctcatgctttggatttttaagaagtcatctagcaacaaagatcctaataccccagtcttcacaggaaggtgggtggacacatctgaaaacttgataacaccaattaagcaggcgatttcagtagcccttaatcaagtgactgaagttttagactatgacatcatggcgcaaaataacgaagcaagtgcattgtcaatccctaagctggaaacccacgcagacattattgttcagcaggctgctaatgagacagacaataaaaaaattaccaaaattgagaaaatagctaatgcagatttctattccattaaattggtgcacaacaacactgttattcattgtgttagaaaaaccgatgactcgtggaagacaaaaaaaagtgttggtataatttccgcactattttctgatgaagggctagagctagaagttaagccaagcttcaatatatctaaaaactttgatttttttatagttaatgacagtgtgctaattcaatcgaaacaaaactttgaatctttattgagctataaagaggcacatattcaagatttctcatccatgcaagcagacccagcatttgcgggggttttttctgatatgtcgcatgttattaactatgttggtaacaataagatgcaacttcgaagagcctctgctatcaagcaaaaaggcttttataagaaccctgcattcatcgatagcctaagaaagaactatcaagcgtttggtttaaatatcagttttgatcaaaacggtaaaatagtacctactcccgactcatgcgctgatattttccaagcattgctggactatcgagttaagtcacatttttctcaaaacatttacaatgtacagagtacggtgttaataaacattacttaa

SEQ ID NO: 96078 - DNA, 573 bp, Enterobacter aerogenes UCI 15
atgaccacggacttcatgtatactggttttttatacagttatggtgggtggtgtatgcttaatggatttgctcgctatgctttgactgctagttcggttgccccagtttgcctgacattggcattcttagcttatatcaatgataattataagattcttgtttcctcaattcttttggctgtcataagtgtggttttttgtgtctttataatcaaacaagcacaaaaatataatccggtcacattgaaaaacttagaatcggcatctccggcagataaggaaataaccaactatttcttgacttacttgtttccacttatatctgggccgaccacttttatggattggcgattagctctgtttttttatttaagtcttttcttctacataaagcactcgtcttcgtatagtttcaatccaattttgtctatcatatttggattcaagttctatgaagccgaagatgacactggggtgagttttgttcttttgtcaacaaaacctcttaccaatgcgaagatcaaaggtttgagggtaaagaagcttactgaacatacctatatgattgtataa

SEQ ID NO: 96079 - DNA, 894 bp, Enterobacter aerogenes UCI 15
atggaactttttgcgattacagacagcgaaataccgactagaataattaaaattgacatagatgctcccgcacaaacggtagtagaaaatctatttagaactcagaggagtgagtttataaatgaagatatcgaagaaatagaattttgtgcatcttataatgttcaggatggtgagatattttccatcaatccatttgatgacgaaataggcattattaatgcaatcgaacggcctgatgctgttccggtttgggaccccgatgatgtgtcagttcattatttcaaagcgttatttacgggtgagccagcttcgaatggtaatcctactcaggtttggcttcaatgtttcgacagacgacaaataattaataatgaaaaatcctttttccaagtagtaacacagcctggaaatagattctcagtgtccactcgtcctggtttttcgcttagtgatcgattaactgctatccttgtgggtgataaattattgttcaagagtttctttatgctccggcgattttttaacatggaagagtattttaatgaagctactagagaggatttagataactttatcggtaatgatatatttcatgtagaaaatgctgaagattttatgacgtttgcagattctgcaattaaaaagaaagtatctttgataataagttctggaattctaaacgatcagcctattgaaaatctaattgagtgtgctcagaagattggatatcaattaggtataactaatgtgaatggtgataataaaatcactatgccaaactctaaaagagaagtgaagcaactattatatttccttgatcagggctacttcaattcaataatcacaaatgagctaatgctgacgaattcgaagcgaccaataagaatttga

SEQ ID NO: 96080 - DNA, 573 bp, Enterobacter sp. BIDMC 27
atgaccacggacttcatgtatactggttttttatacagttatggtgggtggtgtatgcttaatggatttgctcgctatgctttgactgctagttcggttgccccagtttgcctgacattggcattcttagcttatattaatgataattataagattcttgtttcctcaattcttttggctgtcgtaagtgtggttttttgtgtctttataatcaagcaagcacaaaaatataatccggtcacattgaaaaacttagaatcggcatctccggcagataaggaaataaccaactatttcttgacttacttatttccacttatatctgggccgaccacttttatggattggcgattagccctgtttttttatttaagtcttttcttctacataaagcactcgtcttcgtatagtttcaatccaattttgtctatcatatttggattcaagttttatgaagccgaagatgacactggggtgagttttgttcttttgtcaacaaaacctcttaccaatgcgaagatcaaaggtttgagggtaaagaagcttactgaacatacctatatgattgtataa

SEQ ID NO: 96081 - DNA, 894 bp, Enterobacter sp. BIDMC 27; identical to SEQ ID NO: 96021

SEQ ID NO: 96082 - DNA, 519 bp, Enterobacter sp. BIDMC 26
atgaatcgtttagcaaggctactacttactgcgagctccatcgctccagtttgtgtgacgttgattttcatagggtttatgaagcacaacacatggcttatatacacaagtcttgttacggcggttgttagttggatactttgtctgactttagtaactgtggccgaaaaaaaatttgaaattcttagtaagaatattgactccgtgtcacctgcaaacaaagaagtaactaattactttcttagctatctgttccctttacttgggacggattcaattgcaactgtaaaagagtatgctatatttttttatgtatcacttcttttatatatatccttttccgaaaactacaacttcaatcccgtgttagctttacatgggtataaattttatgaagctgaagatgatacgggtgtggggttcgtgttaatttccaaagagattatcacgaacatcaaggatataaattttaaagttgtcaaactgactgaacacacattcctacatgtaaaaggataa

SEQ ID NO: 96083 - DNA, 888 bp, Enterobacter sp. BIDMC 26
atgccgttatttgcaattatggataatcagagcgctataaaaatagtgagaatcaaactagatagagctgcctcgactatgattaacgaaacatttaatcagcaaagacaatattttgaagcgcatcatgactcagtaataccattttatgctggatataaccctagttacaatgaaagctttgaattagagaatttccatgattctaatttacttatggatgcagtaaggagaaacactgcaattcccgagtggaaacctgaagaaataaatatagaccacattaaaggtttgtttgtaggtgttggtgaacctaatgcggaaaattgcattgccttacaaacctttaataaaaagcaaatcctagacacatctaaatcatttgtaatgtccctggttggggcggcaaatacttttagcaaagctgaaaaggttggatttaatatagacgataaattagtcgccattattaaaaatgataaaatttatttccgaagctttttcaaacttcgcagtatctttgacatgacagtgtattttcaagaggctacagaccaagatcttgcattattttccagtaatgctgcattttctatacctgaggggcttgatttgagcgttattgccgacaccccaataagaaataaaataacattaataaataaaagtgggattttagacgctgaattactgcccgttttgaaatctgcagcagaaaaaattggattccctttaaaaatcaaaaatatcgagggccaagaaagaattgaaatgccccaaacaaagagagaaattaaagctctattggattttttggatgaggatatttttacctcagaaattagccaaaaggtctttaagagcaattcaaaaagaccttatgcatga

SEQ ID NO: 96084 - DNA, 519 bp, Enterobacter sp. MGH 37; identical to SEQ ID NO: 96026

SEQ ID NO: 96085 - DNA, 885 bp, Enterobacter sp. MGH 37; identical to SEQ ID NO: 96027

SEQ ID NO: 96086 - DNA, 603 bp, Enterobacter sp. MGH 15
atgaaaaatgattcaaaagaaacaaaggagtatgttaggcgtaaaattgatttatatattctatcgctggctattttattctgttttttcatttttattacattaagattccctgtatgttttggtgctaaatgtgagtttatcggctggtctttgttattgaaaaataatgttgttcccttggtatgtcttgggttgctcatttattgttggattgcctaccgtagatttaaatatgatactaataaaactgtagagctcccattaaaaataataaagatagagaaaataaattacgagcatctaactttcttagctacatatattattccgttaattacctttgattttgaaaaagagagatatgttatcgttctggcagttctcttaataatcatgggggtgatttatattaaaacggatttgttttatgccaatccttccttggctttattggggtttaatatttataagttggacgttagtataactggaggtattaataaaacagggttgatattaattactaggcgacaattgaaagaaaatgacatggtaagttatattgtgcttgatgaaagagtttactattctggagattaa

SEQ ID NO: 96087 - DNA, 957 bp, Enterobacter sp. MGH 15
atgtcaccacagcaaatggataagaaagacttagatgacaatctgagttattatataaataataaagatgatgtttctgtaattatttacgctattcttaaaagcagccctgacgcatatcgtatggatatcgaagcgagcgctcaggatagcttaaaagagttatttttagatagtattaagaataatatcattgatgatggcgatcttagtgttttgcctctatcgtcagcggatgaaagaaataatgttatttatcaatatgatataggatggcctgatgagttaacctctatgcaaaatatgcttggacaaccaggtgaagccgtttttgatttcaaaacacaacaaatagaagatatcagagtattgctagtttgcattggtaatgcagatcagcaaattgtactctacaaaaccatggctccagttaatattttctctcgtactggtttttttctaaaaaaatcagctacaagacttgaagaaattaaggatgacttcttcagggtaagtgataacttccaaattattaaagtagaaaatgatttatatgtagtggatcttaaattaatcgaaaaaatgtttggttttcatgaggttattaaaaaagaagccactcttggcatgactgccattgaagggatgaatattatcactgatatagaggtgataaaagagttaatagatgatataaaatatgcgcgaaagttaactagaatagcaaaatcttctccagttatattagccaagattgaaaatgaaaaaattattgagttttgtaagacctatcctgtattaatcaacagaataagatttaacgaagatggtacaaaaatcgcccttgatactaaagtttcaaaagatctgtttattaaaatattgatggatgactttttaacttcgcaactgactcagttctattatgaaagccttgcaaaggatgcggtaaagtag

SEQ ID NO: 96088 - DNA, 603 bp, Enterobacter sp. MGH 10; identical to SEQ ID NO: 96086

SEQ ID NO: 96089 - DNA, 486 bp, Enterobacter sp. MGH 10
atgtcaccacagcaaatggataagaaagacttagatgacaatctgagttattatataaataataaagatgatgtttctgtaattatttacgctattcttaaaagcagccctgacgcatatcgtatggatatcgaagcgagcgctcaggatagcttaaaagagttatttttagatagtattaagaataatatcattgatgatggcgatcttagtgttttgcctctatcgtcagcggatgaaagaaataatgttatttatcaatatgatataggatggcctgatgagttaacctctatgcaaaatatgcttggacaaccaggtgaagccgtttttgatttcaaaacacaacaaatagaagatatcagagtattgctagtttgcattggtaatgcagatcagcaaattgtactctacaaaaccatggctccagttaatattttctctcgtactggtttttttctaaaaaaaatcagctacaagacttga

SEQ ID NO: 96090 - DNA, 522 bp, Klebsiella pneumoniae NB60
atgaacaaaattgcaaggtttcttttaacagcaagttcgatagctcctgtaggtatcacgctgatatttataggatatatgaaaaacaagccatggcttatttggtggtcgttagggatctgtcttgctagttttatatcagttatttttttcctacactatgcaaataaaaacctcccttctctttataagaatgttgagaccatatctcctgcaaataaagaggttaccaattatttcttgagttatctattccctttgttagggacagattcaatcgccgataaatggcaatatgcagtatttttctatatatctcttatcgtttatatatgtttctctgagaactataatttcaaccctcttatctccgctttaggatttaaattttatgaagcagaagacgatactggcgttggatttgtgttgatatccaaagaagttattacaaatttaaaaaacagagattttgaagttattcaacttacagactacacatttatgcatgtaacaaggaaataa

SEQ ID NO: 96091 - DNA, 870 bp, Klebsiella pneumoniae NB60
atgagcctttttgcaatgatgaataaaaactctgctgtgaaagtgtatcgtattgataccgacagacaaacagacatcaaaatcaaaaaaatatttgatgaccaattatctctttttgaaagtcatcacaatacggaacttgttttcgaagccggatatacccctaactataatgaatgtagttatatagataactttgatgaaggaaaaatacttcttgatgcagttcagcgtagcaccgcaatgcctttgtggacaaaaaatgttgggcttaatgatataacagctttttttatggctcctgcgtatcctcaggtgaaagacaaaatagcaatccaaaccttttcaaaaaaacagatacttaacgagtcaagatacttatggctcagtaaaaattcatttacgatgtcagatcttttgggtttcaatctagacgataaattagttgcaatccttgaaggagataaaataaagttcaggaacttcaacaacctgagaagcatatttgatatgagttcttattttgctgaagcaacaaagcaagagatttctgactttgtaaaccaaccagtttttaatataccagtggggtttgatcttccagcccttgcagataacgtcataagaaaaaaagtcacattaataaacaaatctaaaatattggtaaatcatactgtaaccgaaataaaaaacgcagcgctaactttgaacttccctataaaaacgaccggctcaggaagctccgagaaaatagaaatgccaacaaataaaaaagaaataaaagagttacttaacttcttggatgaagactatttcaactctgaaataactaagcaaaggtttcgatcaaactcaaaacgtaaagcataa

SEQ ID NO: 96092 - DNA, 543 bp, Burkholderia thailandensis E444
atgcttagccgtcttgtccgcgtgctgcttgccctgacggcgatcgcacctttgtcgatctcgcttgcttttcagtttgcgcgatcaaaaaattatctctgggccgggggcgcgttcgccctatgcctgtgtcttggattgttggctcgattgatcatcagcctcgcgtcttctcgcctggagcctctgtcggccaaaattctaaaagcgaaaagcgcagacaaggaggtcatcggtttttttgtcgcctacgccctcccgatgatttttcgcggccaaccggcttcaccagatttgaccgcatggcttttcgcggccggcatgctcttgtttgtgctgtggggcacgcagagcacgcaggtgaacccggttttaggcgtgctgggttttcacttttatgaggtggaaaccgatggaggcatcacgtatcttatgatcacgagacgccgtatcaataacgttttgaccattaagaaaatcgtccagctcagcgagtttggcatcttggaagcgggcgattcagcacaaggaaaagaaaaatga

SEQ ID NO: 96093 - DNA, 867 bp, Burkholderia thailandensis E444
atgaacctgttcgcgctgtcccgaggggaagagcagcctccgatcctgcgcataccgctcaccgctgagctaagaagagaagtcgccagggcatttgttgatcagttggcggcgttcgagagcggcgtcgagcacgtcttgccatttgacggtcgatacatgccggaagacgacgaagcgatcgtcatcaatcagttccaagacgtcgacggcatcatcgacgcgatcgagcggccgatgcgagtcgagttgttcgattcgcgccagcattcgcttgaaaacgtcaaggcgctgtttttgggccatcgccgcaatgggcaccaggcggcgttgatccagagcttcgagcgacgtcgcctgatctctaagaagacgctttcgatgctgttctccggcgacactttccagcgcattcaagaagacggcttgacgctcgacagccatctgctggccgtgctcgaaaacggcgcgataacgttcaagagcttccattttctgcggcgcgtgttcgacctgagcgaacactaccgcgaggccaccaacgaagaagtggaagcgttcgtcgcgcacgacaatattatggtggaggacgctgaggccttcgtcgcggcggccggcccactcatccgaaagaaaatatctttcatttcgcaatcaggcattctcgactcccacactggccgccaaatcgccaacgccgcgcgacaattcaatctgcaagtccgaatcgacggagacgaccggatcgttttgccgaccgacaaagcggaactccgaaagctgctgaaatttctcgacgaagactattacgaatcggcgctgtccaaaagccacttcgtgtcaaactcgaagcggccagctgactga

SEQ ID NO: 96094 - DNA, 603 bp, Enterobacter sp. DC4
atgaccccaaggctgccgtttgcgtttgctgtatttctgggctcatatttgccacttagtatgatcctgctcattcaggattttgatgacagtaaatataaaaggcatctttgctttgatttactgacatctgactcctgtaacctgccgtttaaggaaccattactgtccgtcagtttatttctcatctgcctggtatgttttcttctttcatggcttatattaaaactggctaaaagcgatgagcaaaaaatcaggattctggaagtaaagtatacgccgtcagacctgatgaactatgttctcccttacattgtttcgttcatgagcattaattaccaagagaccaacaaattttttgggtttattgtatttcttctctggctcttctggctgtcttataagaccggacaaataatactcaaccctatacttatcgtattcaactggaaaatgtatgaagtaacttatcgacatccaggtagcaaaaacacacactcaggtgtggtattatcaaacctgagtatttcccctgattctgattacgaatatcagacaatacagtctgtcattattattagtggagataaggatgaaacttaa

SEQ ID NO: 96095 - DNA, 915 bp, Enterobacter sp. DC4
atgaaacttaaagaattacaggattttgatatccagagtgcaacactttctgtctgggtgttcaggaaacagacagtaaaaagtaacccggtatacagggggaaatggatcactgttgttcctgaactcaaaactgaactgacggaatttatttgtgctgaaagaggaaaatacacggagactattgagtattcactactggcccagaacaatgaagccagcctgatgctgattggttccggagaaacctctgcggttgcaattacagcactatctgcggaccaggcacaggccagaaaagtaaaagaaatcaaagaactggcgaactgtgatttttactctgtgaaactggtgtccggagatactgtactacattgtgtcaaaaaaacagatccatcatgggcaacgaaaaaacaatccggattacgatctgttgttttcaaaaacaataaattaaaaatagatgacacccctcgttttaacatagcaaaagattttgatttttatattcttggtgacaatgttttcatcaaaaacaaaaaaacgtttgaatcccttctgagttataaaaaagctcaccttactaactttaacgatctcgttgatgaaccagaattcagtcagctctttaccgatgccgggccactaaaaagatatgtcggaacaaacgcaatgcagctaagaagagcatcggccataaaagaaaaaggattctataagttaccggagtttatggcaagcctcagggaacatgcctcgcggttccggctgaatcttcagtttgatgaacagggcaggattattgccagtgatgcctgctgtgccgatatatttcaggccctgcttgaccatcgcctgcagtcacactttgccgcacatatctacgatgttccgaatgcgtcaccaattcagtaa

SEQ ID NO: 96096 - DNA, 603 bp, Enterobacter sp. DC3; identical to SEQ ID NO: 96094

SEQ ID NO: 96097 - DNA, 915 bp, Enterobacter sp. DC3; identical to SEQ ID NO: 96095

SEQ ID NO: 96098 - DNA, 471 bp, Gluconobacter thailandicus NBRC 3257; identical to SEQ ID NO: 95810

SEQ ID NO: 96099 - DNA, 837 bp, Gluconobacter thailandicus NBRC 3257; identical to SEQ ID NO: 95811

SEQ ID NO: 96100 - DNA, 573 bp, Acinetobacter baumannii 4749; identical to SEQ ID NO: 95900

SEQ ID NO: 96101 - DNA, 987 bp, Acinetobacter baumannii 4749
atggctgtcactatgggtatttttaaggaagatttaaagagtttttctgaggaacaaggggttactgctattgtttatgctttattaaaagatggtcagttaaaaaagctagatattgaaaataaagcgttagatgaccttaaaaatattttcttaaattatattcacgatgagattttattaaatgatgaaatgcatcttttaacgctatcttctgctgatgagagaggaaatgtgatttatgagtatgacttagattttccagaagactttaattgtattaaccaagtttcagatgataaatttccaaaacctgtatttaataattctaaagatgatttaggtaatatcgaggctttggtagttgagataggcaatgaaaaaagacaaattgtactatataaaacaatggctaatattaatgtttttagacaaaagtcatttatcttaggtgctgtcaagactgatagatttgaaagaattgataaagatcttttaagggtaagcccaaatttccagtttattaaaacaaatctgggtttttttgtgctagagctaaaaactttagaaaaattatttagctttcatactgtaataaagaaggaagcaactaaaagctgttcggctatacaagatcgttcaatattagagaatcctgagactttgattgagctgattgaagatataaaatttgcaagaaaattggttaaaatttataaatcctctcctgttttattacattcaattcctaattctgaaatcattaaattttgtgagcactatccgtcattgaaggggcgagtgagatttaatgaagccaaaaataaaatactactagatacaaaagtctccaaagagctatttattaaagttcttatggatgattatttgacttctgagcttacaaaattacattacgatactttggctaagaatgagtttgtagagttaccagaggaaagttcagatttgctcaaaagtgaataa

SEQ ID NO: 96102 - DNA, 516 bp, Candidatus Accumulibacter sp. SK-02
atgctgagattcctcccaaagctcctcttggttgcgacttcgtttgcaccggttatggtgacgttcgccgtcgttttgtggttcgacagcgaacgaagtctggcgctgggtctactcgcaggtgccgttctcgcggtgattgcttgcgtgacggtaatcaaactggcagcaaggcagctctctataaacgatgtcgtaatcaagtcgatcaaaccagcagacaaggagattgtcgggtttgttttggcttatctgttgccgttggcgagggggagtcagttcgacggtgttcccatgttcgtcgttttaggggtgttcttcctcgtggtgatgacgtcgaatgcttaccacaccaatcctctgcttgggctgatcggatatcacttctatgaggtcacaatcgaggacgttggctacacgctcctgtctcggcgaaacctccacaatactaaggcgatcaagtcggtggtcagcctcaccgactacatgcttcttgatgtaaccaaacaaaaatga

SEQ ID NO: 96103 - DNA, 870 bp, Candidatus Accumulibacter sp. SK-02
atgaatcccatacttttgacgaaagacgaagagcgtccattcttgaggctcgacctagaccaatcggccgcttcaggggctcgtgatctgtttctttctgctgccgattcgtttggtcggggcattgagcaggtcgttgaattcgaccccggctataaactccatgatgacgaatgtttcgaaatccatgatttccccatctcggaagacttgatcggattctgccggcagccgctgtctgctgagagagtagattcggctgattttgctgcccttccaataaacggaatcgttggatacgacttctctgccgggcagcggaagctctactttcaaaactttgattcacgacgggttttgattcctggtcggagattcgcgatattgccgatggccgatgcgtcgaccttcaaacaattgaccaagcctgttctgcttttggatgccaatatcactgcggtttggaatgacggcgtattgcgattcaagagttttcacttggcaaagcagcttttcgatctttccacatatttcaccgaggctaccgatgaacagattggaactttcgtcgctcacgcacgccttaagtgctccgattcgagtaagtttatgggtgcttgtaatacgtggagtaggacgaagattgccttgattctccggggaggcattcttgatcacgctacaggcgacatgattcgagatgcagctgcgtcagtcgaatatgaaattcaaatggacagagaccggatcgtccttcctgaagagaaaggcgcactgcgatcccttctgcaatttctcgatgaagacatctacagaggtccgatttcgcagcggagacttctgtcgagcggcaaacgccaaattgaatag

SEQ ID NO: 96104 - DNA, 597 bp, Ochrobactrum anthropi
atgcagttcagggttataccggccttcgtggtgttccttggctcctacttgcctttgagcctcatacttctcgcccagaacttcgactacgccttcgtgggccgtccgccttgttggcggatttgggaggatggctgctcgatcccactgaagaatcctgccttcgccataggaattttcttggcgtgtctcatctgcttcgccttgaccttgtgggcgcttgccgcggtcaagcccaagaatgagatcatcgtccaagaggcgaggcatgtgcctgctgacctaatgaactacacgttgccctacgttgtctcgttcatgagcatcgactatcaggattttggaaaatacatcggcgtgatcatctttctggggtggatgttctggatcagctacaagtccggccagatcatactgaatcccgtcctgattgtgttcggttggaagctttacgatatctcctacaaccacgccgcgtccaagcaggtgcatagcgccaacgtcctcgctcagggggcaatcacgcccggtgcccgatatcgccaggctccggttcaggacatcttgattattaaaccgagcgccgggggagactga

SEQ ID NO: 96105 - DNA, 921 bp, Ochrobactrum anthropi
atgccgttgccgcaaagcctagccgacttcaatattgaagagtccacggtgtccgtctggcttttcaagaaatccgtgactgcggatggtttgccgcggttcagcggccgccatgtcaatacggacgaagagctcgacggcgccttgaaggaagctctcaccgaggcgagggcctccattcaggatgtgactccatatacattgctagcggccgcccaagatggaatcgcgctcggcattgacgcgctggaaacccacgcggatgcgatcaccgcgcagatggcggaccctcttgccgaaaagaaggtccggtcacttaaggacgttcaaaacaccaagttctacgtcgtgaagctcacgcatgccgacaacgcgatccacgccgttaggagcacggataactcctggcaatccaggaaaacgcgcagtgctatatccgtcattttcaaggacgagcagcttggcctgaacgaggagccagccttcagtatttctcgccatgtggattttttcatcgcgggcgacgacatcgtcatgctgagtaagccatcgtttgagaaggtgctcagctacaagcaggctcatgccgaggacttcgtcgccttgcaagctgagcccgcctttgccgcggtcttctcagacgtggcgccgttggtgaccttcgtgggtcagaacaaaatccatctgcgccgcgcctgtgtcattcgccaaaaggggcactacatggatgcgcagttcatgcagcgtctccgagacaattttgcaaggtgcggcctcaacttggtgttcgcagctgatgggaggttggtcgcgacccctgagacttgtgccgatattatccgcgcgctgctcgatcaccgcctgtcgtcgtttttctcggaacagcattatgacgttcccgacgctaccgccgtcgcgtag

SEQ ID NO: 96106 - DNA, 609 bp, Bacteroides fragilis str. S24L26
atgggatataagaataacgatttaaagaaaggagctaaatttgctttattcgtatcttcatatttaccattatttatattggtaatactcaggcaactttcggataactataattatctccactggggaggaatatcaataaatagtattaaaatatttctatctttctttggcttatcaagtgtactaactttggtctctatattgggaattatcggattgtataatacattgaaaaatattgaagatatatcagaaaatggatttaatgcgcaaattattgatattaagaataaaaacagtgaatctatcggatatatagcaacttatataattccttttctatttcaaagccttaatgggtggtatgaagggatttctatcttatttttaatgggtattatatataggatatatataaattcatcaatgatattaataaatccaattcttagttgtaaatattctatttatgatattgagtattctaagaacaaaaaaattaaaaacggatttatcatatcaaaagataattcgttacaggatgaagataaaataaaattatatgaaataggaaacaagctgtttttcgcaataaacaaagaataa

SEQ ID NO: 96107 - DNA, 1032 bp, Bacteroides fragilis str. S24L26; identical to SEQ ID NO: 95691

SEQ ID NO: 96108 - DNA, 609 bp, Bacteroides fragilis str. S24L34; identical to SEQ ID NO: 96106

SEQ ID NO: 96109 - DNA, 1032 bp, Bacteroides fragilis str. S24L34; identical to SEQ ID NO: 95691

SEQ ID NO: 96110 - DNA, 546 bp, Lysinibacillus varians
atgacaaatctttttaaattgtttctgtttatatcgtcatactctccattatatgtcattgttgctctttccatattcccttatgaaaatattgattggcagtcatttagtgaagatcaagtaacgtttaccgttactattatcttggtcgtattattttccctttcctttttaccgatttggtatattaggaaatgtgaattaaacagcacgattgttagtgagcgcgtagcaagaaaaaatgaagagattttaagttacttagtgacatatatcgttcctttactagccatcaatgttaaagaaataagtactttgattacaaatgggattttgtttatgataattggctatttatatattaagtctaatttaatccatgtgaatataacgttcttattatttggatggaacatttatgaggatgagcttggccgcgtaattatctcaaaagacaatccagattattttatcagaatgaacattgctaacaaccctatccgtgttagaaaactggctagtaatatttatttgcataggtcttag

SEQ ID NO: 96111 - DNA, 918 bp, Lysinibacillus varians
ttgaatatcgagctcataaacagcaaaatttcagaacgcttattgagtggtacatttgaagtaagtttgtttttaattgaaaagattaagacgcacgatatgttagactatttttcatttcaaccatcaataagccattctttacaaaaagagataatcaatattatccagccgactattgataagcttgttggaaaagagcaactagaatttaatgaaaatggtcgaccgaatggcgtagtggagtattgtaagtcatcctatataggaataacttatgatcatttattcaaaagtttacaggaaccgggtgaatcattgaatgaagatgtgcaaaaagatttatactgtataaaaattgaaatagaagcagggaagtatgcttatttcctaaatcgcattccgcaatttaagaagttttctaaagggctttggggaatcattgcggatactacttttagaaaagtctcagattcatttattggcattgaaccagggttcgatttacttatttatgacaacgaaatactagtggtaaataatgtttcagtgcaacgaattttcgatttgaaaacaaagtatgtgcacaatacgaattcggtcttatgtgcttttgaagaaacgaataaattagaaggctttgaacaatttaaaaatgatagcattgaagatggtaatatagttaaaagagtttcgcgattaatgacaaagcctgagagaatgacaaggttcgttgaaaattttgataaaatagaagaaattattaaagaatttgacttaaatatagaattaaacgaagaaaagtcaaaaataaaatatacagataaaaaacaattgaatgatatcgtcaagttactgaatgatgcttattataaaactgttcttacgggtgaaagaggcagagatgatttaaggtaa

SEQ ID NO: 96112 - DNA, 516 bp, Escherichia coli 1-176-05_S3_C2; identical to SEQ ID NO: 95682

SEQ ID NO: 96113 - DNA, 894 bp, Escherichia coli 1-176-05_S3_C2; identical to SEQ ID NO: 95683

SEQ ID NO: 96114 - DNA, 330 bp, Escherichia coli O6:H16 str. 99-3165; identical to SEQ ID NO: 95744

SEQ ID NO: 96115 - DNA, 1008 bp, Escherichia coli O6:H16 str. 99-3165; identical to SEQ ID NO: 95747

SEQ ID NO: 96116 - DNA, 516 bp, Escherichia coli O91:H21 str. 2009C-4646; identical to SEQ ID NO: 95682

SEQ ID NO: 96117 - DNA, 894 bp, Escherichia coli O91:H21 str. 2009C-4646; identical to SEQ ID NO: 95683

SEQ ID NO: 96118 - DNA, 510 bp, Aeromonas hydrophila AL09-71; identical to SEQ ID NO: 95886

SEQ ID NO: 96119 - DNA, 888 bp, Aeromonas hydrophila AL09-71; identical to SEQ ID NO: 95887

SEQ ID NO: 96120 - DNA, 510 bp, Aeromonas hydrophila pc104A; identical to SEQ ID NO: 95886

SEQ ID NO: 96121 - DNA, 888 bp, Aeromonas hydrophila pc104A; identical to SEQ ID NO: 95887

SEQ ID NO: 96122 - DNA, 570 bp, Enterococcus faecalis MD6; identical to SEQ ID NO: 95884

SEQ ID NO: 96123 - DNA, 945 bp, Enterococcus faecalis MD6; identical to SEQ ID NO: 95885

SEQ ID NO: 96124 - DNA, 549 bp, Bordetella hinzii 1277
gtgctctttctgagcgcctattcgccccttatgctgattctgatcatcaaggattacgatgcaaccagccccggtctgcttccccagaatccggtattcagcggcatcctgttgctgatcgcagtgttcagcagtttggctgtgcttcgttccgtcagagaaatcgatggcgggctgacggtgacggttaccaaggcgtccaacaaatcgggcgacatgttcggctacaccatcccctacatgctttcgttcatgaaggtggacctgggagactggcaggtcattgtgagcctcgccctttttctagccattcttttcatcatggcctaccgcacccagacggttttcgtgaacccgattctcgctcttgcgggttacatgctgatcgattgcaccttcaaacgcggtgacaaggaaattcaggcgatggtcgtgacacggcaaccgctggccgtgggtgacacttgccgcatggagcggatgtcgcactatctgtatgtggccgtcaaagacaacgccaatctggataaaaagggcacagaaaaatga

SEQ ID NO: 96125 - DNA, 939 bp, Bordetella hinzii 1277
atgagcaacaaggcgcacaaggccaccttgaaggcgatcaaagcgatcgatctaaaaaaatgggtggtcactttctggcttgtcaagcgctacatggcaaatcacgcggcacattactcagtactgcgcgtcaacaccgatgccaagctccagaagcggttgaagggctatgtagtcaatcagttgcagggcaaggactttcacttggccgaatacgatttcaataatgccgatggtgatgacacgctgttcacgattacggcagacgccaccgatttccctaaagtcgaagtggcgataaacgctggctttgacaatgccatcgccaaggaataccaagacctgctcaattcgtgggcgtatgtcgtccagcttgaacacggcaatgatcgactctacgcctggcgcaagatcagcacactcacccagccaaagaaagttcaatcgcgccaggcgacgttctttgtcgaacacaaattggtggacgtagaagacaaggaagtctttctgatcgatccgcgcttcgacttcttcgtgcatggcggcatgatcttcattgccaacaagaaggagttcgaaatttccatgaacttccgcgagggcatgaaggccaaggctgccgaggtcatccagaacttcaatgagagtggccgtttcaagaatgtcgacctcattcagaagcacgtgggcgacaacctgcaccacttgcgcaagatggcatcgatcctcaaggccggttactaccaacagcccgactatatccagcgcatgattgaagtcagcaaggaagaaggctgggagctgaaagtcgaggatgggcaagtcgtggtcgaggcggaaacgatcgacgtgttgttgaagctgctcaacaacgaccgcctgcgctcgccgatcaacaacgaaattttcgacgcggccgccaaggcacctgtgaaatag

SEQ ID NO: 96126 - DNA, 570 bp, Lactobacillus animalis
atgctcgaaaaaattttcaaattatctatatacatatcagcttatatacctatttttatgatgatttttttggcaaatttgaaaagtttttctagcaaaaatattagtattttgtggaataaaaaccccgtattatggtggatatttatagttatatcgatattatcactcacacctttattgtggtggctatatatgttgaatagaagttatcaaactaacagtaaagaaaagatagaaataaacggtgctgatttaaaagacgcagatgtattaaatttttttgttacttttatagttcctattctatctttagatccaacttccttaccttcaattgtgatgaatttttttttattactgatagaagcgatatatgtaataaataataacacaatatataataatattttgttaatacttatggggtatcacatatatacattttctgatgataatgtagtgattacgcgtataccaaaggatgaagtaatttttgaaaatattggtgcgaagcaagttggggcaactaatatatactatattggaaaacaaaacaaagtaaattag

SEQ ID NO: 96127 - DNA, 921 bp, Lactobacillus animalis
atgaaattagaaaatatgctggatcttcttgatgagaaagaacctagggttaatttatttttagtacataaagttaatagcaaaaagagacgtagctttagcgtggctaatcctgaaattacaatggaatttgaaaaaaacttattagatattataaagagtgagttaaggtcatatcaggatatgagggttgtaccatataatataattggatgtaatgataatatcgtagaaatggccaaagtgtccgaatataatgccgtagatttactgaaagagtctttaaagaatcctagccagaagttccgctttgatacttgtggttttgatttctttgtttataaagtttattttactgattctgatgaagaattattcttttttagaaaatccaaaaattttaaaacatttcagaaaggctttgtaggaaggtttatagagggacgttttaaaaaactagcggacactaataaattattggctactgatgaaacgatagattttgttttggatgacaaagatatttatatttttcaacatttatcgtttgaaagagtatttgatttaaacagtaagtttttagtacaagcgaagatggttttagatcgtgtaggagatttatcaaaaattgaaagttttgataaactgagaaaatcagctatgggaaacggaaattacgtaaagagattggcaaaattgaatgatggtgataatgcaaatacggctacgttatttctagaagatttggtacagacacaaaaagtcattaatgaatttaatttagatattgaaatagatactaaaaacaacaaaatgaaatttaaggatgagtctcaaacatctagctatattagtcttatgcaagatgcttattatgagactctaataggaaaagttaaggggattgacgaaagaaggtag

SEQ ID NO: 96128 - DNA, 273 bp, Escherichia coli 2-005-03_S3_C2; identical to SEQ ID NO: 96012

SEQ ID NO: 96129 - DNA, 1008 bp, Escherichia coli 2-005-03_S3_C2; identical to SEQ ID NO: 95747

SEQ ID NO: 96130 - DNA, 633 bp, Geobacillus sp. CAMR5420; identical to SEQ ID NO: 95560

SEQ ID NO: 96131 - DNA, 966 bp, Geobacillus sp. CAMR5420; identical to SEQ ID NO: 95561

SEQ ID NO: 96132 - DNA, 600 bp, Enterobacter cloacae BWH 43
atgaaacgaaaaagcacattcaacaagatgggactatacatactgtctttgatgttgctgtttgtttttattatcattttgagcgcaaaaatcccattttgttatggctcctcctgccattttataggattttatcaattagcttccagcaacataatctcaataatttgtgtaatttttatagggatagcattttatttctatagaagatttaaaggattgactaaggtcaacaacgccgattgtgtaacaatcactgcttgtcaaagtgagagttatgaaagtttgacttttttagccacatacatagtaccttttatgggattcagttttgatgacccccagaaaaatctcgcttactttctcttaatagttgttattggtttaattttcattaaaacggataagtattatgcgaaccctactttggcccttttcggttataagctgtatagagttaacatttcttattcaggaagcagtgaagtaaaaaacgtcattgcaatctcgatggatgtgctgactgttggcgatcaagtattctacagtttttttgatgactacgttttcatagcaaggaaaaaacatgaatccagatga

SEQ ID NO: 96133 - DNA, 960 bp, Enterobacter cloacae BWH 43; identical to SEQ ID NO: 95809

SEQ ID NO: 96134 - DNA, 615 bp, Escherichia coli BIDMC 77; identical to SEQ ID NO: 95636

SEQ ID NO: 96135 - DNA, 1023 bp, Escherichia coli BIDMC 77; identical to SEQ ID NO: 95949

SEQ ID NO: 96136 - DNA, 420 bp, Escherichia coli UCI 66
atgcaatatagcttatgcgttggcatagcaagttggttattagcaataggcctgattcaatatgctgagaaacaacttgaacctctgacaaaaaatattagttcagtttctcccgctaacaaagaagtaactaattatttcttaagctatttattccctctcctaggaacagactctattgctgaaaataaagcatatgcgttattcttttatttgtcattgttattttacatcagcttttccgagaactataactttaacccagtattgtcacttatcggttataaattttacgaagctgaagatgacaccggcgtaggttttgtattgatttctaaatcagtcattactgatattaaagatatcaaatttacagttattcaattaacagactacacatttctacatgttaaaggataa

SEQ ID NO: 96137 - DNA, 885 bp, Escherichia coli UCI 66; identical to SEQ ID NO: 95749

SEQ ID NO: 96138 - DNA, 591 bp, Klebsiella pneumoniae BWH 48
atgaaaagcaaaggcacatttaataagatagggttgtacatactatctttaatgctgttgtttgtttttattatcatcttaagtgcaaaaattccgatgtgttatggtgactcatgtgaatttataggtttttataaattagccatcgacaatgtaataccaataatatgtttcttctttatttttttagcatgctatttttataagaggtttcgctcattaattaaaatcaacaatgctgacactgttacaataacatcctgccaaagtgagagttatgaaagtttaacttttttagctacgtatatagttccttttatgggtttcagtttcgatgacattcagaaaaatattgcttatcttttgttagtaataatcattggtttaatcttcatcaaaacggataaatattatgcaaaccctacgctagccctttttggatacaaattatatagagttaatgtttcttatacaggaagcgttgaagttaaaaatgttattgcaatatccactgatattttggctgttaacgacaaagtcttttacagttttttagatgattatgttttcatagcaaggaaaaaacaatga

SEQ ID NO: 96139 - DNA, 960 bp, Klebsiella pneumoniae BWH 48; identical to SEQ ID NO: 95743

SEQ ID NO: 96140 - DNA, 558 bp, Klebsiella pneumoniae MGH 68; identical to SEQ ID NO: 96020

SEQ ID NO: 96141 - DNA, 894 bp, Klebsiella pneumoniae MGH 68
atggaactttttgcgattacagacagcgaaataccgactagaataattaagattgacatagatgctcccgcacaaacggtagtagaaaatctatttagaactcagaggagtgagtttataaatgaagatatcgaagaaatagagttttgtgcatcttataatgttcaggatggtgagatattttccatcaatccatttgatgacgaaataggcattattaatgcaatcgaacggcctgatgctgttccagtttgggaccccgatgatgtgtcagttcattattttaaagcgttatttacgggtgagccagcttcgaatggtaatcctactcaagtttggcttcaatgtttcgacagacgacaaataattaataatgaaaaatcctttttccaagtagtaactcagcctggaaatagattctcagtgtccactcgtcctggtttttcgcttagtgatcgattaactgctattcttgtgggtgataaattattgttcaagagtttctttatgctccggcgattttttaacatggaagagtattttaatgaagctactagagaggatttagataactttatcggtaatgatatatttcatgtggaaaatgctgaagattttatgatgtttgcagattctgcaattaaaaagaaagtatctttgataataagttctggaatactcaacgatcagcctattgaaaatctaattgagtgtgcccagaagattggatatcaattaggtataactaatgtgaatggtgataataaaatcactatgccaaactctaaaagagaagtgaagcaactattatatttccttgatcagggctacttcaattcaataataacaaatgagttaatgttgacgaattcgaagcgaccaataagaatttga

SEQ ID NO: 96142 - DNA, 591 bp, Klebsiella pneumoniae MGH 69; identical to SEQ ID NO: 96138

SEQ ID NO: 96143 - DNA, 960 bp, Klebsiella pneumoniae MGH 69; identical to SEQ ID NO: 95743

SEQ ID NO: 96144 - DNA, 558 bp, Klebsiella pneumoniae UCI 56; identical to SEQ ID NO: 96020

SEQ ID NO: 96145 - DNA, 894 bp, Klebsiella pneumoniae UCI 56; identical to SEQ ID NO: 96021

SEQ ID NO: 96146 - DNA, 558 bp, Klebsiella pneumoniae UCI 56; identical to SEQ ID NO: 96020

SEQ ID NO: 96147 - DNA, 894 bp, Klebsiella pneumoniae UCI 56; identical to SEQ ID NO: 96021

SEQ ID NO: 96148 - DNA, 519 bp, Gilliamella apicola
atgcctagcaagttacttagaatattattgactgcaagctctattgccccagtgtgcttcactgtagcatttatcggttttattaaccataataatacattactatggttatctctattaattggtttaatattatgttttttatgtatttttgttgtttttgtatatcaaagatgtggggagacacttacaaaaaatattagttcattgactccagctaataaagaaataacaaattattttttagcatacatatttccattattaggttctgaatctattttttctaatacatatatgactatatttttttatggctgcttatcattttatacatttttttcagaatcatataattttaatcctctattatctctatttggttatcgattttatgaagcgcaagatgatacgggaatcggatttgttttattatctaaacaaactataacatcaattaacggtacagaatttaaagtaagaaaattaactgactatatttatatttactataattga

SEQ ID NO: 96149 - DNA, 873 bp, Gilliamella apicola
atgaatttatttgcattgatgaaatcgaatgttggaattcctattttaagaataagtactgatgctaaatcacaaaaagcattaaaagttatatttaatgatcaaaaggctttatttgatacccattacgataatgaaattgaattttgcgctggatatacgccaaaatattcagaaatatttgttataaatgatttcgataatggcatagaagacatgcatgcagcaataaaaactccaacaagtatagattcttggaatcctaaaaaagtacctattgaaaatataaaatgtttatttacaggaaacgctagagatagaaccatattactacaaacatttgataaaaaacaggttttagatattaccaaatcatttatttttagtaatgacgttttcaaaatgtctacaacagtgggatttaatataacagataaattgactgcaataattgaagataaaaaattaaagtttaaatcgttacaaaataccagaaaaatatttaatatggataaatattttagagaggcgactgataatgaattaaaatcatttgtcgaacattgtaaatttaaggtatcagaagaatttgatattataaaaatagctgatactgaaattagaactaaagttacccttttaaataaattagattctttatctgaagatattaacaaaattaaacaagcagcagaaaatgttaattttaagcttaaaactgaagtcacttcaggaggagaagaaaaaatattaattcccatagtaaaaaaagaattaaaagctttattaagctttttgaatgaagatatatttatatcagatatcacaaaaaccacttataagtccaattctaaacgtaagtttactacctaa

SEQ ID NO: 96150 - DNA, 519 bp, Streptococcus equi subsp. zooepidemicus CY
atgtataataggtttattcatatgttgtttaatagttcgatcttaatgccgtttattttagcgattggacttagtaaaacttttatcgaaaaaaactttaaaacaggtcttactataacggttatatcatttggtctagcggctatacaagtaataatactaagaactgctaaaaaaaatattgtcccacaaaggataaatatctcaaagataagtcaagagaaagaaagctgggtattagcgatatatgtctcatattttgtgcctttcatagaaagtagctttggaaagaattttaattttaccaattggatactggttgtaataggcataataatactgattttaagtaaaaggacgacaaataatcctgttttaagtgttctcgggtacaaggtttattctatcgaaaccgatcatggaatagatatgactttgattagtaaacgagatataagaaataaaaaagctatagataaagttcttaggatttttgaatattatgttatggaggcttga

SEQ ID NO: 96151 - DNA, 852 bp, Streptococcus equi subsp. zooepidemicus CY; identical to SEQ ID NO: 95697

SEQ ID NO: 96152 - DNA, 1074 bp, Vibrio sp. JCM 19052
atgaaagaaagaaaagctagtctaaagataggggcgaggttaactctatttctagtgtcctacatgcctttgtttgtaattatggtttttggtcagttttataaatatagcaactaccttaattggggagggtttaattgggattcattgtatgtttttataaaatactttggagctgcgactatactaataatgctatctttatatggctctataggtctgaaggtattgctgacaaacattgaacgtcgagctaaagtcaatggtaatttagttaatatctatgatatagaaaacaaaaatagtgattcaatatcatatttgtttacatatattataccttttgtattccaagatttatcaagtttgataaatgttgtttctgtaactatcttattagtcgttacctttttaatttattcaaactcttcaatgttactgataaacccaacaataagcatgaggtattcactttatatgattgaatacactgactctgatgaaggtaagaagaaaaaaggaatgattatttcaaggaataagtaccttgaagaagatgaccaagtgaaaataaaaaagatcggtcataagttattttttgcagttgatataggagcaatgatgccagctaaaaagaaaataaatgatatcttagatattattggtgatcagaacgtaacgttcaggttgttctttatcactcgacatattaaagatggcgtcaaaaagtcaacaaaagtcatagataagttccaatttaaagcaaatagcatagacatgtctcccgatgttagctcttttttctcaaaaaatgcgcgaactcaacttaaaaagttgaccgagaaggaagggtatgatcttgaatcatacaatgtcattacagatgatctgggggataagctttatacctacgcactaaataacactctatcattttctgatgttgtgtttaatcaattgcttaaaaataaggttggtgcaattgcctcactaaaggatgtgaaaagtgacctttgggcatattgtttacaaatcaatactgtaaacgatgcagctatctgtttcgtaaaatga

SEQ ID NO: 96153 - DNA, 369 bp, Vibrio sp. JCM 19052
ttggaagaagagttcaaaaatgttgctaacgatgttatttctgttattgagtcaaccaacctagtagaaggtttagaacatattaaggtcaacctaagcaaaagtagagcgttgctcaaaactttggcaaatattggcaaaaaaggaaatcactctggtttcaataaagaagaaattgaaaagatgaaaaatgctctgaagctctttgaaggtaaagagcttaaattctcatcagaagggaagttagtattagagaacagtatagacgttggctactttgttaaacttctaaatgactattataaagtgggtgtcattaccgggaagtattatggaacaaatagcggtaatgtgatcgaacctgcataa

SEQ ID NO: 96154 - DNA, 519 bp, Escherichia coli 3-267-03_S1_C3; identical to SEQ ID NO: 95748

SEQ ID NO: 96155 - DNA, 885 bp, Escherichia coli 3-267-03_S1_C3; identical to SEQ ID NO: 95749

SEQ ID NO: 96156 - DNA, 207 bp, Escherichia coli 2-011-08_S1_C3
atgggggtgatttatattaaaacggatttgttttacgccaacccctccctggctttattgggatttaatatttataaattgaacgttagtataacaggtggagttaataaatcagggataatattgattacgagacggcagttaaaagaaaatgacatggttagctatatagtgcttgatgaaagagtttactattctggagattaa

SEQ ID NO: 96157 - DNA, 984 bp, Escherichia coli 2-011-08_S1_C3
atgtcaccgcagaaattagataaaaaaggtttagatgataatttaagttattatattaataataaaaatgacgtttctgttatagtttatgccattcttaaaaatagcccaatagcatatagaatggatatcgaggggagtgctcaaaatggcttaaaagagttatttttagacagcctaaaaagaaatattattgataatcatgagcttggtgttttatccctttcgtcggcggatgaaagaaataatgttatttatcattacgatattgaatggccagacgagttaacttccatgcaaaatatgcttggacagcaaggagagcctgtttttgatttcaacgtgcaaaatattgaagatattagagtgttgttaatttgcattggtaatgctcaacaacaaattatactttataaaacaatggccccagtcaatattttctctcgcactggtttttttctaaaaaaatccgcaacaagacttgaagaaataaaggatgacttttttcgagttagtgataactttcaaattatcaaagtcgaaaacaatttatatgtaatagaccttaaattaatagagaaaatgttttgttttcatgatgttatcaaaaaagaagccatgcttggcattagtgccattgagagtatggatattatcgctgatataaattcgataaaagaactaatagatgatgtaaaatatgccagaaaattaacaagggtggcaaaatcttcgccagtaatattggctaatattgaaaatgaaaaaataatagagttttgtaagatctacccagtgctggtcaatagaatcagattcaatgaagatggaacaaagattacgcttgacacgaaggtctcaaaagatctctttattaaagtcctgatggatgattttttaacctcacagttaactcagttttattatgaaagtctagcaaaagatgctttaaaattagcggctgacaatactaaagagaactaa

SEQ ID NO: 96158 - DNA, 162 bp, Escherichia coli 3-105-05_S4_C1
ttggcgcttttcggttataagttgtatagagttaacatttctcatgcaggaagtggtgaagtaaaaaacgtcattgcaatctcgatggatgtgctgactgttgacgatcaagtattctatagtttttttgatgactacgttttcatagcaaggaaaaaataa

SEQ ID NO: 96159 - DNA, 960 bp, Escherichia coli 3-105-05_S4_C1; identical to SEQ ID NO: 95741

SEQ ID NO: 96160 - DNA, 519 bp, Escherichia coli 3-267-03_S1_C1; identical to SEQ ID NO: 95748

SEQ ID NO: 96161 - DNA, 885 bp, Escherichia coli 3-267-03_S1_C1; identical to SEQ ID NO: 95749

SEQ ID NO: 96162 - DNA, 519 bp, Aeromonas sp. HZM
atgcttagtgggtttgccaagctgttgttgacgggcactgcaatcgctccggttgggctgagttacgcttgggttgcttatatggcagaccagaaaaccacagcattacttatgactgccgggtcattatttcttgtgttgatatgtatctggatgctgcgttatgcgcaaaagaaccttgaaagtattcctttcatcgcttcgaccatagaggccgcagacagagaaaacatggctttcatgctgctctatttattgccgctttttactgcgagtttttctcagctaaattggcagatttgggtgccagtaatagtgatttttgccgttattgccagtacaggatacagctatcactttaatccactattggggttaatgggctggcatttttacaaagtatcgacaccagaaggtgttacttatgtgctggtgacaaaaaaagaattacgtagagcgcaagaaggtctaactgtggtgcagttaactgagtacatcgttttggatataggggattga

SEQ ID NO: 96163 - DNA, 885 bp, Aeromonas sp. HZM
atgccacagaatttgtttgcactggttaaaactggtgatgtagttcaaatacgccgtatcaggatgtctggtcctcttcaacagcaaatcaccaggttattcctccaacaacaggataaattccttcaagggattgatactgagattctatttaatgggaattggaaaccagatgctaacgaaattctggtaattagtggacttgacgagattagtctcatgcaggaggcgatttcaggaaatccaacatcatatcatgatcttgatctatctaaagttgatgaagagacgattaaggcattgttcagtggaagccataatggggggcaatatattatccagatccagcgttttatggcatcccaggctttgctgcgcaaacatatccccattattgggcttcaatctggcaatacttttaccgaaattacgacgccaatgttcactttcgatcataagttggttgcagtaattcagggaaatgagttgaagttcaaaagctactcaatgttaaggagtgtttgtgacctaacatccgtatactctgaggccactgagccggatttggaaagattcgccagtcacgaaatattgcactgtgacaatgttgatgaattcaaatcaaatgctgactctatggtaaggaaaatggtccatgaacttactcaaaccaatgctttggcagagcatggtgtagataaaataactgagtcagcagcagatttccccgatgtcaatatcgtaataaatgatggaaaaatccatctgccaagcgataagaaacaactgaaaatatttcttaatttcttgcttgataatatttatgaggcccccctgtcaggagaaagatatctgaccaactccaagcgaaggatgtctaggtga

SEQ ID NO: 96164 - DNA, 516 bp, Escherichia coli O91:H21 str. 2009C-3740; identical to SEQ ID NO: 95682

SEQ ID NO: 96165 - DNA, 894 bp, Escherichia coli O91:H21 str. 2009C-3740; identical to SEQ ID NO: 95683

SEQ ID NO: 96166 - DNA, 516 bp, Escherichia coli O128:H2 str. 2011C-3317
atgttaaataagcttgccaaatatcttcttactgccagctcagttgctccggtattttttaccttagcttttctttcatgtatatcaaaacactataaatttatgattgcttacttatcattgtgtgcaattatacttttactgtgtgttttgattgttaaatacgcaattaaatataattctgtaaccagtaaaaaattaaccaccgcttctccagcagataaggagataacaaattatttcttaacctatttatttcccttaatcagtggtccagatgcatttatggatattaggattgcttctttctttgctgtgagtttatttttttacatcagtttttcaggttcctacagtttcaacccattattatcattttggggatataaatattatgaagccgaagacgatacaggcgtaagctttgttatattatcgaaaaagccactattaaaagcatcaggcaatcgtgttaatttgattaagcttactgattacacatatatagcaatatag

SEQ ID NO: 96167 - DNA, 894 bp, Escherichia coli O128:H2 str. 2011C-3317
atggaattgtttgcaataacagataatacagttggcacacgcattgtaaaaattgttactgacaggccgactcaaaatgtaatcacacagctattcaatgaacaaaaaactttttttgaagaacgctatacagaaggcgtagaattttcaggtggctacatcactagtggagatgagttttttgtcattcctgactttgatgatgttatcgctgtattagatgctattaataatcccacaactatccctccatgggagccggaagaaatatcagtcttcaatataatcgctctgttttcaggctatcctgaagaggatggaaaacctgcaactgccttaatccaaagcttcgataaaaggcaagttattgataacagaagaacaattttccaaaaaccatttcaggcaagcaataccttttgccagtctactgagcatggtatagtcatcgacaataagctaacagctattcttgcaggtacagaattaaagtttaaaagcttccatatgctccgcaggatatttgatgtagatgcttatttcagagaagccactaatgaagaattaacaagtttttcttctcatgaaaaattttcagtagctccgggttttgatttaacaacaattgctgactccgttattagaaagaaagtttccttgattaataaatcaagaatacttgaggactactctgtgactgagttaagaatatcagcggctgaaattggtgttgttctagaaactgaaaaaatcggtgaattagaaaaaataaaaatgccgcaaataagaaaagatgtaaaaagattattgcattttttagatgaggactatttcacatcccatataaccagaacgctatatcgcgcaaactctaaacgtcgagaagatgtttaa

SEQ ID NO: 96168 - DNA, 489 bp, Escherichia coli 2-427-07_S3_C1
gtgaacaagaaggcattaatattatacattgaaaattttggtgcggttacgattatatttcttcttgtcgtttttggtattgttggtttaatattcttattatcaaatatggaaagacgcattgataatgatggggattttgtaaaaatagtcgacatagaaaataaaaacagtgaatctataagttatctttttacatatcttctgccatttctttttcaagatctttctgaccccatgagtgtattttctttagctattctgctactggttacatttcttatttattctaactcatcaatgattcttataaatccaactttagctataaagtactcactttacagcattgagtatataaatagtggcggccaaaaaaagaaaggaatgataatttgttcgaataaatatttggacgaagatgacagtatcaaaattcaaaagattggttacaaactcttctatgctaaatatcaggaattagaataa

SEQ ID NO: 96169 - DNA, 1020 bp, Escherichia coli 2-427-07_S3_C1
atgacggaaatagacattaaaggtattttaaattcactaatgaatctttatcactcgaatacattttcgatgaaatgttatttgataacaaagaaaattaataaagattcttcagtctcatcagaaaacagatttatatttgatatctataaggtgagtcttgacaaaaaaatggtggatttttttaaaactgggtcattggatacattaaacaaaatggtaggcaacaacgaattagagtatcatgactactcagtgatttctgatgatgggactgacgctatttatggttatgcaaatattgaagaccttgaattcaggaaagtattagaaaaaataaataaagactcaggaataaatatattaaagagtctagaggaagttaagtctgatatattggctttttgtttaaaaatatctacacaagatgatggttttaccatttataggaagctaacaaaatctaaggtggcaacagatactccattgaatacctttcaaaaaatgcaggctatctttgatgttaatagtgctacaatgaaagtcgttccgatgcagacagtgagttttgacaaaaaaatagattttatctttaaaaataacaagatttatattgtatcgaaattggggtttgaacaaattatcgggatcgaaaaagaatttgtggaaaatgcaagaagtgtgttaaaggttatttctgatgcttctattatagataatataaaaattctggaagaggttattttaactaataaaacacttcagcgaactattgcgagcatagctcaaaaaaagaaccacgaaaatttaagtcctgacataataataaaatatcaagaaacgttaaatatattcgaaggtgctaagttagaggaaaaaaatggtaggctagtaataaaagatgcatcagatgcacgattgctaataaaagtattgaatgatttttataagcaaggtgttgcttctggtaagtattatggcactaacagtggtcatataattgataaaaaaaataattga

SEQ ID NO: 96170 - DNA, 621 bp, Escherichia coli 2-427-07_S3_C3
atgtcatcacgaaaagaagagttaaaaataggagcaaggttgacactatttttggtgtcttacatgcctttgtttttaattatgaccgtaaatcaactatacaagaaaaaagattacctcaactgggggggggtgaacaagaaggcattaatattatacattgaaaattttggtgcggttacgattatatttcttcttgtcgtttttggtattgttggtttaatattcttattatcaaatatggaaagacgcattgataatgatggggattttgtaaaaatagtcgacatagaaaataaaaacagtgaatctataagttatctttttacatatcttctgccatttctttttcaagatctttctgaccccatgagtgtattttctttagctattctgctactggttacatttcttatttattctaactcatcaatgattcttataaatccaactttagctataaagtactcactttacagcattgagtatataaatagtggcggccaaaaaaagaaaggaatgataatttgttcgaataaatatttggacgaagatgacagtatcaaaattcaaaagattggttacaaactcttctatgctaaatatcaggaattagaataa

SEQ ID NO: 96171 - DNA, 1020 bp, Escherichia coli 2-427-07_S3_C3; identical to SEQ ID NO: 96169

SEQ ID NO: 96172 - DNA, 543 bp, Burkholderia thailandensis USAMRU Malaysia #20; identical to SEQ ID NO: 96092

SEQ ID NO: 96173 - DNA, 867 bp, Burkholderia thailandensis USAMRU Malaysia #20; identical to SEQ ID NO: 96093

SEQ ID NO: 96174 - DNA, 588 bp, Vibrio parahaemolyticus
atgttcgaaaaaacgcataatgcagtactattatatattctttctctaagtggtttatttcttttgttttttttgcaaggcttaaacctttcagtactttttgatgagaaaaagaattggatcgacgctgtaaatgccaatggtatgtctctatttttcttggttctactatttgtgtgcttcttgatatacagaagtttctctaactatttaaaaaacaatactggtcgagcaacaaaactacaaacttgtagtaatgaaagttttgaacagcttggtttttttgctacatacattgttccactaattagctttgacataactaaatccgacggattagttagttgcatttcacttttagtgataacaggaataatctttgtaagaacagataagttttatttaaatccaacattagccatttttggatttaaaatatacaaagtggagtgtggcttgaagtgttcaggtgaaaacacagttatagttataactaaggataaattgcaacgaggagacatcattaattacaaaacactttccgaaagagttatttatgcccaaagaaaaaaaacgattaacaactaa

SEQ ID NO: 96175 - DNA, 987 bp, Vibrio parahaemolyticus
atgcccaaagaaaaaaaacgattaacaactaatttatttaaaaaaaggtttaaggattttatcgaagattgccaagggatctctatttacttccgtctcaaaaatgatttattgagatgtgccaacatcgacaacggagctttagataaaataaaagatgaggcgtgctcaaacctgatggaaagcattgtaggaaaccctcgctttcattttttaaggctttccaatactgatgatcgtaacccggcagatgttatgcatatttttgactttgccaaccccgacgaaattggtacttttgttaagattaaccaagctgaagaagctagcgaacaagcgcaacaggtaaactacgcccctgataggaacgcggcttttgaagatgtaaacgcaattattatcgttctagaagatagtcagggccgtaagttaactctttatcagaaaaaaacaaacttctctgtcttaaaagagcatactaatctctgtaatgttttttatgacggtgcaacgcttaagcagttagaccaaaatatattacaaattaataacaaatacatgtgtttgaagttcagtaaactattcatggtgagaaatgtcgatcaatttgaaaaagactctggttttagggatataattagcaaaaaagcaggagactgcatcacctttttagatcagtctggacttgtgaaagatgttgagcctttaaaacagtcagcaaaacaattgccgtttgctaagaagcttaccaaagtgctaatgcattctggtgttataagtgcaaaagtatctaatgaaaaaattattgactttgtcaaaagtaaagattatttggaaaaggtaaagctaaccgaagacgaacagcagttcgatttaaagctaaagtattcacaaaacaaacttcttgagatactagatgaggcatacttaaagtcagaacttacaggtcacgaattctacgtcagagctaaagaccgtaaaaaatga

SEQ ID NO: 96176 - DNA, 618 bp, Vibrio parahaemolyticus
atgaacaccctacagaaaattaagctttacattctgtctctggcactactgtttgtgatcatagctatcattacagctaaactcccaaaagaatcatttgaatggtgtaaaccagaagaagcctgcaacacaaaagcaattttaagcaacttgtttaattatttttttctactactaaaagcaaacgttattccactagttatgcttttgttgctcgctattagctggtacttcaagtacgaattcgaccacttacttcaaggcggcggacagaaaataatccgaattcaatctatagaaaacgaagactatgaacaccttacgttcttagccacctatattattcctttctttggctttaaatttaacgacccaaatcaattcaccgcaattattgtattgctcgtaattataggtgccatatttgtaagaaccaataaatattacgctaaccctaccttagcggtacttggttataggctatataaagcaactttaaatgacaaaaatggtgtttatgaatcgattgttgtcatcagtaaagatcaattaaaagaaaacgaaattgtacactgggaaaaaatatcggataacgtattttatattaaaagaaaataa

SEQ ID NO: 96177 - DNA, 957 bp, Vibrio parahaemolyticus
atgagcaagtttaaaacgtggctagaggatttcatcaacgggtgtgatggaatagcagtatattttgtagatgatgcaaaccagatacatgactctgatattgactcaaaagttctcgctaagtttcgaacggctttctgtcaggacttaagaaaaaagtacactgatagtgatgactttgaagtagagaaactttctacctttgaggagcgacctcacactctttatggttatgatttttctccaagagagatgcctttggagttcaaacttactaaaaatgtgttggacatcaaaccgactgatactattccgaaatatcaggtcaaagcgaataagctcagtggtattcgtggggcaatagtactactaacaaaaggaattagtgaatccattgctttttatcagcacatattccctgtttcattattaggtccagataaaggcgtattaaacctcactacacatgccactaggcttattgagttagaaagtgacgtactgaaactcaatacaaaatttgttttcatgcaatgtacacatggatattttgttgagaacgttggcgtattagaaaccaacctccacttcaaaaaagcaataaatactcgtgccaagaagtatgctggcgaaatactctctatggggttagtagaagatacaaccgtaattttagatcgtatagaaaaagaaccgacttatgctaagaaacttatctcggcatataaaaactcgatggtaatatcccaaaaaattccgatctcggacatgataacctttgctcaaaagaaagaatattacagcaaatatttaaaaccatctaaaaacggaaaaagtcttgttgttgatggtgtaaccaaaagtaagcgatttcttgagctgctaaatgataacttcctaaaatctgaactaaccaacacagaatatttagcccgttctaaaaaagcatttaagtag

SEQ ID NO: 96178 - DNA, 588 bp, Vibrio parahaemolyticus; identical to SEQ ID NO: 96174

SEQ ID NO: 96179 - DNA, 987 bp, Vibrio parahaemolyticus
atgcccaaagaaaaaaaacgattaacaactaatttatttaaaaaaaggtttaaggattttatcgaagattgccaagggatctctatttacttccgtctcaaaaatgatttattgagatgtgccaacatcgacaacggagctttagataaaataaaagatgaggcgtgctcaaacctgatggaaagcattgtaggaaaccctcgctttcattttttaaggctttccaatactgatgatcgtaacccggcagatgttatgcatatttttgactttgccaaccccgacgaaattggtacttttgttaagattaaccaagctgaagaagctagcgaacaagcgcaacaggtaaactacgcccctgataggaacgcggcttttgaagatgtaaacgcaattatcatcgttctagaagatagtcagggccgtaagttaactctttatcagaaaaaaacaaacttctctgtcttaaaagagcatactaatctctgtaatgttttttatgacggtgcaacgcttaagcagttagaccagaatatattacaaattaataacaaatacatgtgtttgaagttcagtaaactattcatggtgagaaatgtcgatcaatttgaaaaagactctggttttagggatataattagcaaaaaagcaggagactgcatcacctttttagatcagtctggacttgtgaaagatgttgagcctttaaaacagtcagcaaaacaattgccgtttgctaagaagcttaccaaagtgctaatgcactctggtgttataagtgcaaaagtatctaatgaaaaaattattgactttgtcaaaagtaaagattatttggaaaaggtaaagctaaccgaagacgaacagcagttcgatttaaagctaaagtattcacaaaacaaacttcttgagatactagatgaggcatacttaaagtcagaacttacaggtcacgaattctacgtcagagctaaagaccgtaaaaaatga

SEQ ID NO: 96180 - DNA, 333 bp, Vibrio parahaemolyticus
atgaaagttttgaacagcttggttttttttgctacatacattgttccactaattagctttgacataactaaatccgacggattagttagttgcatttcacttttagtgataacaggaataatctttgtaagaacagataagttttatttaaatccaacattagccatttttggatttaaaatatacaaagtggagtgtggcttgaagtgttcaggtgaaaacacagttatagttataactaaggataaattgcaacgaggagacatcattaattacaaaacactttccgaaagagttatttatgcccaaagaaaaaaaacgattaacaactaa

SEQ ID NO: 96181 - DNA, 372 bp, Vibrio parahaemolyticus
ttgagatgtgccaacatcgacaacggagctttagataaaataaaagatgaggcgtgctcaaacctgatggaaagcattgtaggaaaccctcgctttcattttttaaggctttccaatactgatgatcgtaacccggcagatgttatgcatatttttgactttgccaaccccgacgaaattggtacttttgttaagattaaccaagctgaagaagctagcgaacaagcgcaacaggtaaactacgcccctgataggaacgcggcttttgaagatgtaaacgcaattatcatcgttctagaagatagtcagggccgtaagttaactctttatcagaaaaaaacaaaacttctctgtcttaaaagagcatactaa

SEQ ID NO: 96182 - DNA, 588 bp, Vibrio parahaemolyticus; identical to SEQ ID NO: 96174

SEQ ID NO: 96183 - DNA, 987 bp, Vibrio parahaemolyticus; identical to SEQ ID NO: 96179

SEQ ID NO: 96184 - DNA, 588 bp, Vibrio parahaemolyticus; identical to SEQ ID NO: 96174

SEQ ID NO: 96185 - DNA, 468 bp, Vibrio parahaemolyticus
atgcccaaagaaaaaaaacgattaacaactaatttatttaaaaaaaggtttaaggattttatcgaagattgccaagggatctctatttacttccgtctcaaaaatgatttattgagatgtgccaacatcgacaacggagctttagataaaataaaagatgaggcgtgctcaaacctgatggaaagcattgtaggaaaccctcgctttcattttttaaggctttccaatactgatgatcgtaacccggcagatgttatgcatatttttgactttgccaaccccgacgaaattggtacttttgttaagattaaccaagctgaagaagctagcgaacaagcgcaacaggtaaactacgcccctgataggaacgcggcttttgaagatgtaaacgcaattatcatcgttctagaagatagtcagggccgtaagttaactctttatcagaaaaaacaaacttctctgtcttaa

SEQ ID NO: 96186 - DNA, 588 bp, Vibrio parahaemolyticus; identical to SEQ ID NO: 96174

SEQ ID NO: 96187 - DNA, 468 bp, Vibrio parahaemolyticus; identical to SEQ ID NO: 96185

SEQ ID NO: 96188 - DNA, 591 bp, Bacteroides fragilis; identical to SEQ ID NO: 95766

SEQ ID NO: 96189 - DNA, 852 bp, Bacteroides fragilis
atgagccaattttatgcattgatgcctgataatacagtaaaacatatccctctaaaagaagagataataacagagattaaaaacctatttataaatagtggggctacattcaaaccagaaggtatagaagaagatgttttcgatggcaatattgttagtcggaacggagaaaatataacgtacgtgcattatgacttacctgaagattttgctcgtataccatgtaatcaggctgacatgtccgaatacaatataaatgaagatatgcctaaaagcatcttttattacgatgatggaaagttctattttcagatctttaataagaaaaatatgttgcaacgcaaaatggtcttgcggtttgaatatggaaatgtatttgcaaaaatgaataactctgcttttattgtcgaagataagattcatgcgttgtacgaggagggaaagctatatttccaaagttatacagtcgcaaatcaaatattctcactaataaattttgttacagaagctacaaatgctgaaattgaatcctttggagaattagatggaattaatgtaaataccgaaagcataaagcatatagcaaacataaagacacgtcggcttataaagttgttgtcgaacactgacaatatttcaacttttatgagaaaagcatctcgaacaaaaacaagcctattaaataaatacggagttaatgcccaaataaatgaaaataaagaattggttttaccaacaaataatgttgcagatttgaaccgtgttttagagtttctcaatgaggacatatttaggggtgtaattaccgacagactttatcgttcaaattcaaagaaaaaagataatcactaa

SEQ ID NO: 96190 - DNA, 330 bp, Escherichia coli 2-316-03_S1_C2; identical to SEQ ID NO: 95744

SEQ ID NO: 96191 - DNA, 1008 bp, Escherichia coli 2-316-03_S1_C2; identical to SEQ ID NO: 95747

SEQ ID NO: 96192 - DNA, 273 bp, Escherichia coli 2-316-03_S1_C1; identical to SEQ ID NO: 96012

SEQ ID NO: 96193 - DNA, 957 bp, Escherichia coli 2-316-03_S1_C1; identical to SEQ ID NO: 95851

SEQ ID NO: 96194 - DNA, 603 bp, Shewanella xiamenensis
atggggatggatctttcaaataccttggacaaaatcgggttgtacatactttcactactggttttatttgtttttattatatttttgactgtagatgttccgtactgttttggcgagaattgcgaatttgttggcttcagtgcatttgcagacattgcaaagaaaaacttttctagcatcttgtcgctgctggggttggttgcaggtgtgtatttctattttcggtttgagaatgaagtgaaaggtggctctcttgatgtcatgaagatcgagaagtccagcagtgagagctatgagcacttggtgtttttagcaacttatatcctgccattcattggttttacttttgatgagccaagaaagacgattgcttacttcttacttttggccgttattggattaattttcatcaaaaccgataaatattatgctaacccaacactggctctattgggttacaagttatttaaaactgacgtgagttgtagaggcagtcagtataaaaatatggtcattatttcaacgagtgagttgagtgaaggtgaccaagtaaatttcaagttcttatccaacagtgtttgttttgcaaggaaggtcgaatga

SEQ ID NO: 96195 - DNA, 954 bp, Shewanella xiamenensis
atgacagttgaacagttcaaaaacaaggtgagtgcaattgttgatgattgcgttggtatcaaaatgttctttgttgatgacgaagcaaacattagagattcggatgttgataatgctgctctggtccgcttaaaaacgagcatggtctcaaagttaaagactgggatcgtggaaaatgaatcattgtcaatacctctattatcggacgctgatgaaaggaaaaacgctctttataagtttgactttgacgaaaagccgcttgaatttgacctgttagagcaagccttacaactaagagttaatgcgccggataagtaccaagttggggacgggaattttgatgatatcagtgcaataatcgttgtattgacggggcgaaacaacgaaacgattacactctacaagcatcagtacacagtgtcagtactcaaagctgaacaaggtgcattgaatctgttcaaatcaaataatagattgtctgaacttgaatcaaacatcctgaagatagatcccaatttcgtatttcttaagcttgataacgattattacgttgaaaatgttaaaacgctggagtcatatcttgggttccacgatgtaatcaaagacacagcagccaaatgcgtagcaaaactcacagatatggcgttgatcgaagatactgcaccgctagtcgaacgggtagaaggcgaggatatggcgttttctcgtaaactagcaaaggttgcccgcaactcgccagtaatgggagcagtagcaaacaacgacatcatcgcttttgcacagaaacacaaatatctgtcaaaactactaaaactcaatgacgcaggggataagtttgtcttaaagacaaaaatatctcagaaccattttattaaacttatgagtgatgactacttggagtcagagttgacaaatattcaatatgacagtttggctaaagacaaactggaatag

SEQ ID NO: 96196 - DNA, 648 bp, Escherichia coli Nissle 1917
atgaaaattagaatgtatctcttatcaatgttgtttttatttataccgataacaatatatttttctggtattgataacgtatggtctgttttagataaggccatgtcttcgtgttctggcgcggatggaaaatttcaatgcgtactcgactattcaaatagcagattaacattttctgtattgaggtcagtgatctgcggggctttgattttaacttgttcttatacatacatttggtatcgatgggttttgaaaaacttagactccggtgcggtgtcaagaaagttaaaggtcgtttcatgtaaaaaagaatccggtgagtatctttcttttttatcaacgtacataatgccgttggtctttactgatttaagcaaaccatcaaatatagttaattttttgtttgttttgattatcgtcggttttttgcacatcaaaacaaaaagaattcactgcaacccaacattgtcattatttaatgtttctgcctataagattacttacagtgtggtagctaatggaagggaaaaaacgcaagacggtgagttgatagttttatctaaagatttaataaaagaaaatgattttatcagagttataaatcatgatgattatttaacgttcgcgaaaaaaatcatagaggaatga

SEQ ID NO: 96197 - DNA, 1143 bp, Escherichia coli Nissle 1917; identical to SEQ ID NO: 95803

SEQ ID NO: 96198 - DNA, 651 bp, Klebsiella oxytoca KONIH1
atgtttataacagagagggctatatttcaacccctcaaggaggatgctgtgaatgccgaatcgagaaaaaataaggagcaaataagaagaaaggtggacttatatattttatcccttgctattttatttgtgttttttatcttcattacatgtaagtttccggtatgtttttcatcacaatgtaagtttattgggtgggaggtgctattaaaaaataacatagtgcctgctatatgtattatcttgttgttatattcgtttttcgcctattacagatttaaatatgacactaaaaaatctgttgagcttccggttaaaatagtcaagttagagaaaataaactacgaacatttaacatttctggctacatatattattccattaataacttttgattttgagaaagaaagatacatattagttttagccgctttattggttattatgggtgtaatttatataaaaacagatcttttttatgcaaacccatctctcgcattattaggttttaatatttataaggtcgatatcaatatctctggaaatgttataagggagggtgtaatcgttataacacgcagaaaattagaagcgggtaaaatgttcagctatattgtactggatgaccgggtttattattctggcaattga

SEQ ID NO: 96199 - DNA, 975 bp, Klebsiella oxytoca KONIH1
atgactacacaggctgtgacaaaagaacgtttagatgctgatttgcagtattacattaataataaagacgatgttgccgttatagtttatgctatcgtgaaaggtaacaacgcccctctgagaatggatattgaatctccagcccaaaatggactgaaatctctttttttgaatgtgattaacaatgatattctcaaaaatgaagatttgaccgtattgcctttgtcatcagttgatgaaaggagtaaggtcctgtatcactatgacattccgataccggatgaattaaaatgtctgaatcaggctttgggccagccggatgagccagagtttgatttcaacgttcataaaattgaagatataaaggttctgttaatctgcataggtaatgcagaaagaaaaatgacgttgtataaaacaatggcgccagtgaacatattttcacgggacggtttttttcttatgaaatcggataccaggctgaaggaaataaaagaggacttcttcagggtaagtggtaacttccagattataaaaattagcggagagttgtttgttgtagatttgcttttgatagaaaaaatgtttggttttcatgatgtaataaaaaaagaagcagccagaggaatgcagtctgtcagtgatatgaatatccttactaatatggacgcattacatgagttaattaacgatgttaaatatgcaaggaagttaacgcgtgtagcgaaggcttcacctgtaattaatgcggggattgataacgtcagtattattcagttctgtaaaacgtatccaaccctgaaaggccgtattcgttttaacgatgaggaaacgaagatctctttagataccaaagtatcaaaagacttattcattaaagtattaatggatgattttctgacttcacaattgactaaattttattatgacagcatagcaaaagatactctggttaccgaagttgtcggtgattga

SEQ ID NO: 96200 - DNA, 561 bp, Anditalea andensis
atgaagccaaagttattaacagcaattctattatttataagtgcgtattcgcccctatttttgattttggcggtgaaggattttgatttttatatcaattataaattcaatcaccccttaggtatttcgattttgcttgggctatcggttttaagtgtgattttactttttgtaacaatcaacactatcaagagaggtaatatgcctgtcacggtgaaggctgtaaaaaaccgctcagtcgatttaattaattacacaattccttacattgtttcatttttcggatttaatcttgccaaagttgaggatataatttcactttcaatattcctgtttttacttcttttactcaccataaaaagcaaatcagtttttatgaatcccattttgcttttggctggatataatctttacgatttggaatatgagtttgacggtaaaccttcatctacaatcgtaattagtaaatatgaaatgaagactggtgaaaggttttacataagaagcctaactcgcttcctatactttgtaactgaaaaagagactacagatgcccaatag

SEQ ID NO: 96201 - DNA, 957 bp, Anditalea andensis
atgcccaatagacaaagacaaacattaagacaattaaaagccctggatttgagaggcactaatgtgactttagcagtcgtcaaagaatacaaacgtgatagaatatctcaatataaggttaaatatgttccgatagatcaacgtctggaaaacaggctaaggactattattgtaaaccctattaaaaattctaatacagtcgaggaatacgcctatgattgtcctgaaccagaagaagacttggttagagctatagattatgaagcaaccgatttttatcaaattttcaaacaattagaagaactcaacccagaagaggacataatcgaaaacgtagaggagcttgttaaatccaaagcctacatgataattctacgaaatgcagaaggaattcaagtggtcggttttaaaactctgccagagaactggagaatgaagcgaaacaagggattaattcctttacttttcactgagaatcgttttgaagatttagagcaagaaaatgtatttagtatttcaagcaaagttgatttatactatttcaatgaataccttttcattctttcaaaaaaggactttgaaaggggtttaaacttccgtgatggtatgataaacaatgctatagaaatgttccaagaagttacggagttaaatattttcataaacatggagatccttacggaaagggttgggaataaccagaggtatttgagaaagattgccactattagaaacttaggacattacagaaattcaacttatttacaaagactgcatcaattgagcattacaaagcgatggaacattcagtttgaagaggaacaaattgtaattacggacgagacactggatgacatcttaaccttgctacaaaacaaaagacttcattctgaattgacagaagaagattttgacgtagatagtacaaaaccagtaaattctaatacacaacaatga

SEQ ID NO: 96202 - DNA, 591 bp, Bacteroides fragilis; identical to SEQ ID NO: 95766

SEQ ID NO: 96203 - DNA, 852 bp, Bacteroides fragilis; identical to SEQ ID NO: 95767

SEQ ID NO: 96204 - DNA, 537 bp, Gilliamella apicola SCGC AB-598-B02
atgattaaatatttttggagattattattaacggcaagttcaattgctcctgtgtgttttacagtatcattcattggatttgtgaataaaaatcattatttattgtacagttctctagctgttggagttggtatttgcttaacatgtatagttacaattaatttggcaaataaacagttacaaattttaaaaaaaatgattatatcagccacaccagctaataaggaaattaccaactactttttaagctatgtatttcctttgcttggttctgaaacaatttttcaaaatactggcatgacaatttttttctttgtatgtttaattgtatatactcttttttctcaatcatataatttcaatccgcttttatccttatttggctacaaattttatgaagcccaagatgctacgggtgttggttttgttctattatctaaaattacattgcaatcaatcgatcccaaaaaaacagtcaatgtgaaacaattatgtgactatatttacatttattataatggagataaaaatgaataa

SEQ ID NO: 96205 - DNA, 870 bp, Gilliamella apicola SCGC AB-598-B02
atgaataataattactcgttatttgctatcatgaataacagtgttgcaacaggagtattaataataaatatgtctgccgacacccaagaaaaagtatcaaatatattaaatcaacaattgagtgcttttaattctcattacgatcgtgaaatagagttttgtgcgggttatactccaagtcaatcagaaatttttacaatagatggatttactgattgcaatgaattatataaatatatttctggagagataaaagcaacagagtttaaccccaaaaaacattctgctgataatattaaatgtctttttgctggcaacgaagaaacaataattctacaaaattttgataaaaaacaggttttaaacgtggaaagaacattatttctctcaagtaatgtttttgaattatctacatcaatcggatttaacttacccgataaattagcaggggtggtaacaggaaataaaatacgatttaaatcgttccaaaatctgagaaaaatatttaatatggataaatattttagagaggctacagaagaagaattaaaacaatttgttttgcatgataaattttataaagaacctggttttgacatcatcaaagtctctgataccgaaattctaacgaaagtagccttaattaataaaatttcatcaatggacttccctatttctaaaatgaaaaaatatgccaaacaggtcacgtttgatttgaaaataattaaagatgataaaggtgaagaaaaaatagtaatacctacagacaaaaaaggtataaaactacttttaagttttttaaacgaagatattttcaaatcaggaataactaaaaaaacatataaatctaattcaaaacgaccaatctag

SEQ ID NO: 96206 - DNA, 612 bp, Listeria monocytogenes
atggcaacaacacaacaaaaaattatgctctatctatcctcctatttacctttatatattttattatttttaaatatattttttaacagtgaaaatgaatctgagatgcacaaaaatatcaatttttgtgcattagttcgatttgaaaacatacaggtaagcgtttatgctagcgtattatttattctatcctgtctatccatttataatgttttgaggctaattgttttaaaaaaaggtaacgaagaaatttcaattgtatcccagttctcaagtatgggtgataatattataagttatataatgacatatattgtaccaatgctatctataaacccttttaatttgtggagtttaatatctaacacatttctttttattattataggaataatttatatttctaataaccttatatttttaaatcctgtcattgctgttttaggttttaaaatatttgaagatgataaaggagcagttgtaataactaaaatgagtataggtgatttggatgcttttaaaaaaagtaacactgaagttatgaaatacgagattgattctaacatctatatgttaaaagaaataaagaaagaaaagccctgcaaacgctag

SEQ ID NO: 96207 - DNA, 942 bp, Listeria monocytogenes
atggagataaatatagaagaaatgtataatgaaatcgaaaaattaagaaaaaaatgtaatggtaaagtagcattatttctcataaggtataaagcgggagcacctttattctataaaccacacatccaacaagaggttcaagaagaacttttggatatatttttagatgaatttaaaaatactgctaaaagaaatgtgaatcaagaagagtatgatttcgtaataaataataatgatattaattatattactaataaggataaatttgttgaaactaataattttttttctaaattagaagatgaaaacaatcatataaaagagttaaaaaaactagcaatcaatcaagtttttgcttatagtgttagagtgaaattagaaactgataattatttatattttttcggctcatttaaaaatttagctaaaataaaaaagggtaaagtaattggaaatcttaaaaaaaatgaacttgtctctttagaaagcaatagtgttctaggattagatggtaatatcaaactgttattttgggaaaacgatattttaattagacaaacaagattttttgaaaagttatgcgacttgtcgaaattgtataaaaatgaaagccaaaaggtattaaaagttatcagtgaatatgcggttattgaaaatatgactagattaaccgaattggctaatgaaaatattttaattgctagaagacttactaaactaaattcggaccctgagcgggtgaaaaatttttttaaaaacgtggaaaatgttgaaaaggtccttcaagatgaaaaatttaatgataaatttacgggtataacttatgtcgataagaagttaaattatgatgaaaatgaacctaataaatttattactttaatagccgatgcagcttatgaatcaatagttgggaaagagaaaagaatagacaagggattataa

SEQ ID NO: 96208 - DNA, 585 bp, Listeria monocytogenes
atgttgacaaaatcaaaaaaatggtgcttgtttatttcttcatatcttcctctttatgtattacttcttatatcttttttattcaataataaaattcctcatgaatttcgggaatatttctcaacactgccagcaggaattgtagttttatttttattaattttgttttcaataacggtaatattaaaattaataatactaaaaaaagggaatgagcggattcccataacagaaaattatagtagtactggagacaatgttattagttatgtaatgacctatattataccgatgctttcactgttagataatccaaatgcggagaatataacaataaatatattactatttatctttattggagttgtttatgtttcgaatgatttggtatatttgaatcctatcttagctttcttaggttatcatatattcgaatccgataaaggaaccttaaatattaccaggctaactctaggtcaactggatgctctaaaaaaagaaggtacaaaagtgatgcgttataaagttgccacgcaggtatttttgataaaaagaataaaaaaaagaaatgaaaaaaagaaatga

SEQ ID NO: 96209 - DNA, 936 bp, Listeria monocytogenes
atgatggatttacagagtatttatagtagcttatctgagatgtcacctgaagaaattaatggaaggatatcattttatttaattagatataaaaatggaaatcctcttatttacaaaccggaaattcaacaagaagttcaagtagaattggtcaatttgttcttagatgatttcaaaaaagaaaaaagaagggaaatccagcaagaagattatgattttgttgtatcaaataatgatttgtattatacaataaagaaagacaaatacaaagaaataagtaatttatgtgacaaatttgcagatgatgaacatattgaaagtttggacaacctacacttaaatcaaatttttgcatacggggttggagtttctttagaggaacttgaatttatgtactttggaagtttcactatgatttcaaaaattaagaaaggaaggattctagcaaatttaaacaatagtgaattgaaagtaataaaaagaaatgaaactttaggtctagatggatctgtaaaagtaatttggtctgaagatgaaatattagcgctgaacacacaattttttgaaagactttttgatttaactaaattatatagagatgagtgtaaatctgtactttctactatttcaggatacgctgttattgacaatatggaggatttagttgaacatgcaattagtgatactcgtattgcaaaaagattaactaaattgaacaatgatccagagcgtgtaaaagcattttttaaaaatgtgaaaaatgtggaagaggtattgaaatctcccaatttaaaagagagatttgatggtatcaaatatatagatgaaaaacttgtttatgatgaaagttgtaaacacaagtttattactctaattgcagatgctgcatataaatccattgttggtcagcaagagagagttgacaagagtttatag

SEQ ID NO: 96210 - DNA, 585 bp, Listeria monocytogenes; identical to SEQ ID NO: 96208

SEQ ID NO: 96211 - DNA, 936 bp, Listeria monocytogenes; identical to SEQ ID NO: 96209

SEQ ID NO: 96212 - DNA, 585 bp, Listeria monocytogenes; identical to SEQ ID NO: 96208

SEQ ID NO: 96213 - DNA, 936 bp, Listeria monocytogenes; identical to SEQ ID NO: 96209

SEQ ID NO: 96214 - DNA, 585 bp, Listeria monocytogenes; identical to SEQ ID NO: 96208

SEQ ID NO: 96215 - DNA, 936 bp, Listeria monocytogenes; identical to SEQ ID NO: 96209

SEQ ID NO: 96216 - DNA, 585 bp, Listeria monocytogenes; identical to SEQ ID NO: 96208

SEQ ID NO: 96217 - DNA, 936 bp, Listeria monocytogenes; identical to SEQ ID NO: 96209

SEQ ID NO: 96218 - DNA, 585 bp, Listeria monocytogenes; identical to SEQ ID NO: 96208

SEQ ID NO: 96219 - DNA, 936 bp, Listeria monocytogenes; identical to SEQ ID NO: 96209

SEQ ID NO: 96220 - DNA, 585 bp, Listeria monocytogenes; identical to SEQ ID NO: 96208

SEQ ID NO: 96221 - DNA, 936 bp, Listeria monocytogenes; identical to SEQ ID NO: 96209

SEQ ID NO: 96222 - DNA, 585 bp, Listeria monocytogenes; identical to SEQ ID NO: 96208

SEQ ID NO: 96223 - DNA, 936 bp, Listeria monocytogenes; identical to SEQ ID NO: 96209

SEQ ID NO: 96224 - DNA, 585 bp, Listeria monocytogenes; identical to SEQ ID NO: 96208

SEQ ID NO: 96225 - DNA, 936 bp, Listeria monocytogenes; identical to SEQ ID NO: 96209

SEQ ID NO: 96226 - DNA, 585 bp, Listeria monocytogenes; identical to SEQ ID NO: 96208

SEQ ID NO: 96227 - DNA, 936 bp, Listeria monocytogenes; identical to SEQ ID NO: 96209

SEQ ID NO: 96228 - DNA, 585 bp, Listeria monocytogenes; identical to SEQ ID NO: 96208

SEQ ID NO: 96229 - DNA, 936 bp, Listeria monocytogenes; identical to SEQ ID NO: 96209

SEQ ID NO: 96230 - DNA, 585 bp, Listeria monocytogenes; identical to SEQ ID NO: 96208

SEQ ID NO: 96231 - DNA, 936 bp, Listeria monocytogenes; identical to SEQ ID NO: 96209

SEQ ID NO: 96232 - DNA, 585 bp, Listeria monocytogenes; identical to SEQ ID NO: 96208

SEQ ID NO: 96233 - DNA, 936 bp, Listeria monocytogenes; identical to SEQ ID NO: 96209

SEQ ID NO: 96234 - DNA, 585 bp, Listeria monocytogenes; identical to SEQ ID NO: 96208

SEQ ID NO: 96235 - DNA, 936 bp, Listeria monocytogenes; identical to SEQ ID NO: 96209

SEQ ID NO: 96236 - DNA, 585 bp, Listeria monocytogenes; identical to SEQ ID NO: 96208

SEQ ID NO: 96237 - DNA, 936 bp, Listeria monocytogenes; identical to SEQ ID NO: 96209

SEQ ID NO: 96238 - DNA, 585 bp, Listeria monocytogenes; identical to SEQ ID NO: 96208

SEQ ID NO: 96239 - DNA, 936 bp, Listeria monocytogenes; identical to SEQ ID NO: 96209

SEQ ID NO: 96240 - DNA, 585 bp, Listeria monocytogenes; identical to SEQ ID NO: 96208

SEQ ID NO: 96241 - DNA, 936 bp, Listeria monocytogenes; identical to SEQ ID NO: 96209

SEQ ID NO: 96242 - DNA, 585 bp, Listeria monocytogenes; identical to SEQ ID NO: 96208

SEQ ID NO: 96243 - DNA, 936 bp, Listeria monocytogenes; identical to SEQ ID NO: 96209

SEQ ID NO: 96244 - DNA, 585 bp, Listeria monocytogenes; identical to SEQ ID NO: 96208

SEQ ID NO: 96245 - DNA, 936 bp, Listeria monocytogenes; identical to SEQ ID NO: 96209

SEQ ID NO: 96246 - DNA, 594 bp, Pantoea sp. 3.5.1
atggatagcaggccatatcttaaaacagtactatatatactatcactgtggcttctatttttatcattattaattatgtcctacgataaggttttgataaaaaatctgtgggactatatttttactgaaaactttactttctcaatctcgtcattgaaagtgagaaatatcgttttcatagttagtttgattttcatctttattggtgcaattattttaatagtccttgcaaatagctttggttcgggttggtctgttgcatgcactgtctcggatattagcaatgaaaaccatgaacatttagagtttttaaccacttatataatgcccttagttttcactgatgtcgatagtaagagaactgtattaaatttagggttgatgatatttgtaatcggcgcaatatacgtaaagacaaaccggttttattctaacccatcacttgcaatactcggattcagaatatacaaagctaatgtccatgaccgtggagtgaaaaaatgcacagtaatctgccgcagtgttctaaagagtacagataatataaaatatataaaaatcgacgatgaaacttatttggctaaaatagtgtag

SEQ ID NO: 96247 - DNA, 972 bp, Pantoea sp. 3.5.1
atgttcactaacattgaaaatattttaaaatcgaaatgcatctctggcgaagcattttttgttgctgatgtccagggtacgatagatatatttaaggttaaccttgaacctaatgctgaaaaagatctgaccacttcattttctaaaagcttaatcaataatattattgaacctaacagaggtaaagcggccgttccacttgtatccactttattagaaagagataaacaagttttcgaatatgatcacttagcaattaatcatctcccaattgaatttactaaaatgaacaacgtgctaaatttcggtgtcaatgggaatgcaacacagtttgattttgcaacacaaagcctgacatcggtaaaagccgtaatttaccacctttgtgatggtaatggaaacagcgtagtcatttaccaacataaatatcctgtttctctacataagaaaacaaaaaagtctttcttgagtctaaatggcagaaccttagataagatcactcatgacagtattgatataaatgacacgattgacttcttcttttttcagaataagtactatgcgctaaacattaaacttcttgaaagaatgtatggattagaaagtgtaatagataatcttgcaaataactcaacgccattaataataaaccttggaattgttaatacacaaggtatgccagtcccactagatattttcaaggacatgtataaagacagagcatttatgcgtagacttgctatggtttcaaaagggaacttagtaaaaacgggagtttcagtccctcaaatacaacaagttatgcaaaaattccctgtatttcaacggaatattgatctaacaggaggattaataaaccttaatactaaagatcaaaagagatactttatccggcttctaaataatgaagcatcttttgcagcacttgataactcgcccttcctggctgttgaaaaagactccgctgcttaa

SEQ ID NO: 96248 - DNA, 534 bp, Gilliamella apicola
atgattacttattttttaagattattgttaacagcaagttcaatagctcccgtttgttttacagtatcatttattggatttataaataataattactatttattatacataccgctttttataggtgtttttatttgtgttctgtgtgttgtaactattggtttaataaataagcatgtgcaaatattaaagaaaaaaattacatctgttactccagctaacaaagaaattactaattactttttagcctatgtattccccttacttggttctgaatcaatttttcaaaacgcaagtatgactatttttttcttcgtatgcctaattggatacacgcttttttctgaatcatacaatttcaatccacttttatctttatttggttacaaattttatgaggctcaagattctacaggtgttggatttgttttattatcaagaaacactttagtatcgataaatccaaaaaaatcaattaacatgaaacaactatctgattatatttatatttattatgatggagatggaaattaa

SEQ ID NO: 96249 - DNA, 858 bp, Gilliamella apicola
atgtactcattatttgctattatgaatgacaacgttgcaactggtgtattaataataaatatgtcggctaatacccaaaaaaaagtaacaaatatattaaaccaacagttaagcgtttttaactctcattacaatcgtgaaatagaatattgtgcaggttatacgccaagcccatctgaaatatttataatagataattttacagactgtcgtgaattatttcagtatacctctggagaaaagacagcaacggaatttaatcccaaaaaacactctgcagataatattaaatgcctttttacgggtaattcaaaaacaataattttacaaaattttgataaaaaacaagtgttaaatgtaaataaaactttatttctttcaaacagcgtttttgaattatctacatccattggatttaatttacccgataaattagctggagtagtaactgaagataaaatcaagttcaaatcacttcaaaatttgagaaaaatatttaatatggacaaatattttagagaagccacagaggaagaactaaaaacatttgttgcaaatgataaattttataccgatccagggtttgatatcatcaaaatatctgacaccgaaattttaacaaaagtggctttaataagtaaaattaaaacaatgacccactccatttctaatataaaaaaatatgccaaacaagtggggtttactttaaaaacaaccatagataatggcgaagaaaaaatagtaatgcctacagataaaaaagagataaagctacttttaagctttttaaatgaagacatttttaagtcagggatgtcaaaacaaacatataaatcaaactccaaaagaccaatataa

SEQ ID NO: 96250 - DNA, 519 bp, Xenorhabdus bovienii str. feltiae France
atgtttttaaacaaatttgctcgttttgcattaactgcaacttctgtggctcctgtatgcatcacattagcctatttggcttttatccaaaaaaaccacattatgcttggtgtgtatatatttataggagttataagtgtttgtttttgtatttttatattgaattattctattcatcattctggtcaaacaaaaaagaatataaaaacagctactccagctaacaaagaagtaacaaattactttttgacatatttatttccattactcagtacgtctggaacatttcttgactggaaaattgctgcattcttttacattagtttgcttgcttatgtttctttctctgaggggtatagttttaatccgttgctatcattcttcggttacaaattttacgaagcggaagacgagacgggtgttagttttgtattgattaccaaaagagatttattttcagtgaataacgacagattagatgttataaagctaacagctcatacgtaccttgttgtttaa

SEQ ID NO: 96251 - DNA, 885 bp, Xenorhabdus bovienii str. feltiae France
atggaattatttgctataaccgacactggtaaaattgtgaaaattatcacagactcaaagacgcaaagatctgtaagcgctttgtttaaaaaacaaaaagaatattttgaaaacaattacacaacatctgtagagtttagtggtggttatattaccagtcctgcagagtatttttgcattgataattttgatgatgttataggtgttcttgatgcaattcagactcctaccccaattcaagagtggagtcctcaagatatatctatttttaatataaaagcattgttttctggtgaagttacttcatctgaaacaggaggtaatataaaagcttatcttcaatgttttgataaaaggcaaataatagataataaaaaaacattatttcatagtgtaattcaagacaaaaatacctttaagctatctgattcggatggtttggttatcgataataagctaactgcaattctcgagaataataaattaaaattcaaaagctttcatatgttgagaagaatattcgatgttgatgggtattttaaggaagctactgatgatgatttgagggcgttttcgaatcatgaacatttctatatttcagataattttgaccttacaagtgtcgcagatactgtaataaggaagaaggtatcactaataaacaaatcaaggatcttagaacttcatagtgtggaggctttattgtcagcagctaatgaagtaggtcttgatttagatatacgcgaggatgacggtaaaaataagattgcaatgccacaagagaaaaaacatattaagaggttattgtgttttctggatgaggattattttacgtcacagattactcaaacattatatatgacaaattctaagaaaaaggtgtaa

SEQ ID NO: 96252 - DNA, 519 bp, Xenorhabdus bovienii str. feltiae Florida; identical to SEQ ID NO: 96250

SEQ ID NO: 96253 - DNA, 885 bp, Xenorhabdus bovienii str. feltiae Florida; identical to SEQ ID NO: 96251

SEQ ID NO: 96254 - DNA, 564 bp, Vibrio cholerae
atgacaggaaataatgaaggtttgtcgctagctagactactaatggtcttgagcagtatgtccccactattcattctttgggcaattaaggggtggggaataaaaggtatttcggaagtatattttctttctttctgccttttttttattacggtgccaaatttattcttgtggttccgcgtaagattagtaaaaaaaagaaaagatcggcgagaattgaccgctggcgattgtgaggatcacagagatcatctacttgtttacctttttgctatgttacttcctttctacagtgtcaatatcgatagtattagagacttagcgggtcatgtggcggcaataacgttcattgtatttctgttttggcatctgaatatgcattatatgaacattttttgggccatgaaggggttcagggtatatacgttgaaacctgatacagaaaataactctattagtggcagaattcctgtcgtattaatcacaaagcgctctcatattgtcaaaggagagaaaatttcagcttacaggcttagccaaacggtatttttagaggatgaataa

SEQ ID NO: 96255 - DNA, 912 bp, Vibrio cholerae
atgcctattaactttgattttgaaaatgtaaatataactgagtttggtcttggtctggatagtcccaatcgaggttttgtgtttgttcctgttgatgaagtcgtacagaagtcattagttgaaatggttagttttacaaagacacagatgcaggataaggcgagcagtatggctacgtatcagccatcagaaaaatatgcttctattgaatatcttaccttttcaatcaatgacccattggtacaagagcttaaaactcttcatgagtccgaaaatgtaccagaagattgcagtgcttttgacaatatcaatcaatgtttcgcgtactttgtaaagctcactgataacaaccaacagagaataacagctgtacgtcgttcaactcagtttaaaactttaataaagaaaaggcataggctggttcagtatgttgataatactttaaagtcgttagaggaaactgttttcaaattggataatgacttcgattttattattcagaatgatttaattcatattctccgccctagtggcctagagtttacagctcaacttcagaaggcaattatggatgcagttccagccaacattgcgagtattgcgagtgaaattgatttcgttaactttgatagtatatctcagtacgctcaaaaccacccgagagctgcaagatatattgcttccattaaatctcaatcagaagcaataaacattagtcaagataagctagaacgttactgcgaaaaaactaatgttgtcacaaatatagttgatgggaagattaatttagacagctcgcagattatgggatttttggaagtcctagacaggcgtcgatacgaaatagatctaaaagacgatggagagtcggaagtttatagagcgccgagcagaagccgagtaactagttag

SEQ ID NO: 96256 - DNA, 516 bp, Escherichia coli; identical to SEQ ID NO: 95682

SEQ ID NO: 96257 - DNA, 894 bp, Escherichia coli; identical to SEQ ID NO: 95683

SEQ ID NO: 96258 - DNA, 546 bp, Flavobacterium psychrophilum FPG3
atgaaaaaaatacaactttatattatttcactttggttactattttttttggtagctgtaaaggaattcgtttttatttcttggactttttcatcttcctacgaaaacataatgaactttttaagccttaattcaatttcattaatttcattttgtctttcccttttagggttattttactatgcaaggtttacttattttttgaaaggttcgacaagattgccaaaaaaaatcataaaaattgaagaccaaagctatgaacatttaacttttttaacgacatacataattccttttttgagagttaaattagaaggcaaagatttagttgttacaattctgcttttgataataatcggagctatttttatcaaaactaacttattttataaaaatccgactttagcactactgggttacaaactttttaaagtagatacagaaaaaaacactggactaatttttatatcaaaacaaaatttaaaattaggtgacgaagttcaccacattccattaagtgataacgtatatttcgtaaaattatga

SEQ ID NO: 96259 - DNA, 960 bp, Flavobacterium psychrophilum FPG3
atgacaagagaagagctaattactagactaaattattttttaaacccgaacaataatgttggtgcagttttatattttgtgttagaccacgaaggagaaacagtaatacggtttgctgatattgaaaatgtggcaaaactagaattaaaaaatcgttttcttgaatatattcaggaaaaattcataaacaatgaagaacttcattatcaaaatattagcgaggcggatgaccgaaaaaatgttgtttataagtacgatatagatgaacgacctgaaagcttaaatattcttgacgaaattcttgctaacgaagaacaaattcatttcaactttaatcaagaccaactcgttaatattaaagggtatttaataacaatcggaaatgaaggaaataaaatagctttatataaaaaacatcactcaatgaatatattgagaagagatcggtttttattggttccaagtggagaaagacttgttgaagtacaaaacgatgtaatagcattagataaaagttttgattttatgatggttgatgacaatctaatagtgttgaaattaaatatacttgagagatactttggttttgaagatgttatcagaaatcaagcattaaatacaattggtttagttgaagcaaatgaattacttgaagacattgaacaattaatggaaattgctcaaagtatgccgaatgcaagaaaattaatgaaaattcgtaactcaccagttttaaacgtaccagtaattaatgtaataaactttatcagaaaccatccagaattaactggtaaaataagttttaatgcagatggaacaaaaataaatttagaaactggtgtttccaaaaagttgtttttgaaattactgaatgatgacttcttattttcacaacttacagaattacaatatgacagccacgcaaaagataaattattagaaattcaaaatgaaaattag

SEQ ID NO: 96260 - DNA, 381 bp, Yersinia enterocolitica
gtgttctatttattctcatctttatccagaggctggggaagtactagaaaggttataaatgtaaaaaaccaaactcacgagcatttggagtttttgaccacatatgtcatgcctcttgtttttacagacgtaaacagcaaaagaacagtgataaatttattgctaatgatttgttttattggggtgatttatgtaagaactaacaggttttatgccaatccttcacttgccattctaggtttcaggttatataaatgctctattaagagtgatccttcttgtaaggaatacactataatatgcagagggaagctatcaaatggcagtcaagtgaaaattaagaaaattgatgacgatactttaatcgctaaacttatctaa

SEQ ID NO: 96261 - DNA, 1008 bp, Yersinia enterocolitica; identical to SEQ ID NO: 95669

SEQ ID NO: 96262 - DNA, 636 bp, Yersinia enterocolitica; identical to SEQ ID NO: 95668

SEQ ID NO: 96263 - DNA, 1008 bp, Yersinia enterocolitica; identical to SEQ ID NO: 95669

SEQ ID NO: 96264 - DNA, 555 bp, Burkholderia xenovorans LB400
atgtacctcctatcgctctggttgctcttcgtgcttgtaatcgtcaataaggcggttatcgatgtcaacatctgtcttggttgttcgcttctgccttggtcagagttatcaaaaatcgtaaaagaaaaccttctgcctttagtgtgcgttgcaatgcttgcagcgtcagctgttttttatatggtctttgttaggataatctccggtgcaaaagacggcccgatcaaagtcgaagaattggaagacaagaacgcggagcacctcgtctttctggcaacctacatcatcccgttggtgggattcagtttggatagcccgagacaaatgataaatcttggaattacattgcttttgcttggtgcaatctatataaaaactgatcttttttacgctaatccaacactgtcgctattgggttttaaaattttcaatataaggtctcaaggtagcgctgcgattttgatttctaaagaggaattagaggcgggcgattccgttaatgtagttcggcttgacaaaaagattttttttgcgcgaaaggcgacgcgagtctga

SEQ ID NO: 96265 - DNA, 918 bp, Burkholderia xenovorans LB400; identical to SEQ ID NO: 95565

SEQ ID NO: 96266 - DNA, 516 bp, Pantoea vagans
atgcttaactcttctgccaaatatctgttaacagcaagctcggttgccccggtctgcttaacgctatcttttgtggcggcagttaacgagcattatgcgtttgcagcctttagcgttggtattgctgtgctcagtttcttcttatgctggctcataatctttttgattaaaaagcacattaatatcactcacgtcaatcttcgctcggttaaaccagcaaacaaggaaataacaaactactttcttgcatatcttttccctctaattactgatgataaattgatttcagactggtacctggcttgttttttttacatcagtctgtttgtttacgtaggtttttcgggtagctattctttcaatccgttgttatgtttattaggctataaattctatgaagctgaggatgatacatctgtttcgttcgtcctcatttcaaaagatacaattcggcagggacatgttgacgatttgaaagttgttcaagtgactgactacacctttttgataatttag

SEQ ID NO: 96267 - DNA, 870 bp, Pantoea vagans
atgcagcttttcgctttaacagatgaagaccttactcctaacatttataacattgatgtagataaaaaaacttcaggggttatcaaaagtgcttttacacaaatggaagctgattttaataacgcttacaatgaagtgattccgtttagtgctgattacaagcttgataagagagagcattttattttagaagggtttaaagagcatgagactttagtaaaagctcttaaaattcctaaagcggttcccaatctccatatagaccgcgttcctctcaagaagattcgagcattgtttaccgggtctactgatggtaaaaaaataattatccaacgctttgacagtcgccaagtgctgactccttccaatatacttttcttagatagcaaagcaaccttcactcacacaaccttcggtggaatctctattggccctaagataaccgctgtaattaacgctgatactattacttttggtaacttcaacagcctgagacgtgtgtttgatatggacgcctattttcgcgaagccaccgatcctgaacttgacagttttcaagacaatggtgttttcgctattgaggagggatttaagctttcaagctttgacgataccactatcagaaggaaggtaacgttacttaatcagacaggaatccttgatactggtaacatcccagcgttaattgcagctgcaaaagaattaaagcatcctcttgaaattaaagatactgctgaaggaaaacgaatcaatatgcctgttgaaaaaagaaaaattaagcttcttctaaattttcttgattcagatatttacatatctgcggtcaatggcagaaaatatcgctctaactccaaaaggcagattgattag

SEQ ID NO: 96268 - DNA, 576 bp, Prevotella histicola JCM 15637 = DNF00424
atggtgagaaaaattgttttttattttttatctctttggttattatttgttttgatattcatcataacagcagatattcctatttgcttatgcaaggatagttcttttgtagaaatcaggtacttcttcttgcatacaatcattccactatgttctattgtagcattacttttgggtggatatgcttaccttaaattcttacatataacaaaaggtacaaaggaattgtcttttgaaattaaagaaattgaaagtatcgaatatgaacatttgacctttctaactacatacattatccctttagtatgcttcaatttcggaagtttacgatatattgtagttttcgttatattactttttgtaattggttgtatatatattcatacagatatgttttatgccaatccaagtttagccttactcaattttaggatttataaggttaaaggattatttagaagtggagaagtgcgagagaataggattctaataacaagagataaattagacattggagataatgtaaagtatctaaagttggatgaacgaatttattatgcattaaaaattaaataa

SEQ ID NO: 96269 - DNA, 954 bp, Prevotella histicola JCM 15637 = DNF00424
atgaacaaacaagaattgaatgaagcacttgcatttataagtgcacccgaaggggaattacagattatcatttatgccaatataagtggggcaaatgaaccaagacggttagatataaaggaagaagacttaactgaacttaggaaattatttgtggcaagtatagagtcttctatcatttcgaaagaagaccatactgtgttacttctttcctctgctgatgaacgaggaaattgtttctatcaatatgatttagaagttccagaaggattagggcatttagaaacaataattggaaatgatagtcttcaaaattttgattttaacaaaaataaatttgaaagtatagagtcactaattatagttttagcagattctaagcatgagatatctctattcaaaaagttatcaacagttgaggtaataggtagaggaggttttattttggggaagtctaaacatagaatcgagcggtttaaagatcagctattgcgtataacctcaagtttccaagccttaagagttggtggtgaaataattataataaacttagatgctatagaaaaagaatttggctttcatgaagtaattataaaagaagcaactaagagtctttcagttattgaagagaaagaactcgtagataatattgaaagtttaaaagatttagtaagtgatgttcggtttgcgcgtaaacttaccaaggttgcaagaaactccccagttataaggcttggtatccctaatgagaatatcattacatttgcgaaaaagcatcctttgacaaaaaagaaaatgaaatacaatgataaccagacaaaatttcatttagatactaaagtttcaaagaatttattgattaaaattttaaatgatgatttactaacttcagaattaacaaaattatattatgatagtcttgcaaaagacgatataatagtagaagaggaataa

SEQ ID NO: 96270 - DNA, 282 bp, Veillonella montpellierensis DNF00314
attatgacatatataattccactcattactaatggagataattcaaaagaagtttatatagttaatatccttttatttgttttgattggatatatttatttaagattaaatttgatatatttaaatcctttgtgggctatgtttggatatattatatatagagatgccaataaagagattgtaataactaatattcctagagaaatgttaaggcataaagaaaagttaaaaggctattatataagtaatgatatatttgttgctcataaaaaagacaattag

SEQ ID NO: 96271 - DNA, 930 bp, Veillonella montpellierensis DNF00314
atgaaatttaaggggaaagttatggatataaatacattaaaagacaagatacaagaaaatgatttggagtttaatcttttttttactagaaaattaagaaatggtaattatgtaagtttttcccctaatattgatgcacaaatttatgatgatttactgagcttgatatgcgattatattggacaatttacagacaaaacaattgcgaattataatccaactggatataaagacgagactatagagagttgtagtgcttcatatatacgtgattatattagagttttagaaagctttaataattcggatcatgtagaaacagaaattgatcccgataattacagtttttacactttttcaataactaaacacgatgatcaatttcctgatataaaaatttttagaagggtaactaaatttaagaaattgcattcaaaaggtattattgcaagatttaatgggaatactttgaataaaattgaaagcaaattaattggcatagatggagaagtggattttataattatagataatgatatacttatattgtctcattattcattagagagagtctttaacttagatgagcaatttagagatacagcatcagattttttaaatcaagaggggctaagcgatggtataactaactttgaaagtttctatgaagactgtttaaatgatggacgttatagaaaaactcttacaaaaatgaccagtgaaaatataaatgttgctaaaacttatgagaatcatgaaaacataaagaaaaccatagatatgtttaatttagagataaattataacgaagaaccttcattttcaatagtgtatgaagataaaagccagataatggatattttaagaatattgagagattcatattatagaagtatcattaatgagcaaataggggtagatgataagtaa

SEQ ID NO: 96272 - DNA, 615 bp, Clostridium orbiscindens 1_3_50AFAA
atgggaaacacgcgacaaaaacatgagcaagacacagctataaagcttcgcttctattttatgtcattatggctattgttcgttttgattttcctattaaccgttgatatcccaatttgtttttctaaagatgcgcactttataggttttggaccgttgttgaaaagaaattggcttgcgtttatctctttattctttgcaattctgggatggcttgttgcgtctcgagagaaacaacgatgggcaggagtaacgaatccgccgtatgaaattgagtccatcaaaaacgagaattatgaatatttaacatttcttactacctacataatcccgctgatttgcatcgatttaaccaagattcgatatgtgttcgtgctggccgttctattggtgctaatcgggtttatctttatcagaatggacttatattgtgggaatcctaccttggcacttatgggatatagattgtatcgcgcagagattaaaggcgtggatgctcccgatggaattgtgttgatatcaaaagaccgtttatccaaaagatcagctattaaatggatttccatcgataaatatgtctggatagcaaaggagataaagaatgacgtcggatga

SEQ ID NO: 96273 - DNA, 543 bp, Clostridium orbiscindens 1_3_50AFAA
ttgataaaacgagaaagtttcttactgggagcaattagaagcagtgaacgttttgagaaactgcccggagaagatatcatacgattgaataatgatgcgcagcttttgcgagtaggcgacactatatttgtgctcaatttaaaaatgctggaacgtaatatgggcttttcggctctcatccaacaagcggcaacggaaactgttagcgcaatcgaagagctggacattttggatgatattgaggtgttgcgggatacacttgaagttccatcatttgcgcggaagctttctaaagtaaaaaaagcatcacctatttttaagctagggatatcaaaagaagcaattgttgaatttacaaaaaacacgccagagcttgcaggaaagttcaaatatagtgaagatggaactcagatcaggttggacaccaagaaatctaaaattgcatttcttaagttgatgaacgatgcttttttgcactctgaattaactcaacagtggtatgatgcatctgcaaaagacaacattactcaaggggctggataa

SEQ ID NO: 96274 - DNA, 591 bp, Lactobacillus sp. wkB8
atgaaaaaattgcaaaaagttatgggaatttgtctaaagatatttttatttttatcttcatatatacctttatttattatggtttttttgaactcaatgaatcaaatttcaataatatcaattgtcaaaacatggaatttgaatccgactctctggataatttttttggttataagctttctctctattgtaatatttatttcttggctatatagaatgaaaaaaacatttaagggcaaaagcccaatatctataaaaaacttaactttgaatgattcagcagttttaaatttttttgttacatttattgtgccaatcatttccttaaagcctgaatcttggccatctgtgatttcaaatttaattttattaatcatagaagggatcttttttattagcaataacactctttatttcaatatattactaatattctgtggatatcatatttatagctttgtttctgacaataatagaaaaaatatcgttataacaaaatgtagtttaaaagaccaaacctttaatgatgtaaaaggggtagagtacggtacaactaatatatattatgctgaaaaaataaaacataaataa

SEQ ID NO: 96275 - DNA, 942 bp, Lactobacillus sp. wkB8
atgaacttagatgaaataaaaaaactgttaaacaatgatttaattgaagttgacatgtatatgtgtcattggtcaacagataaaaagaataatcagaaagagttaaaagtaataaatccaactataaaagataagctgaaaaaacaattaaagcatattgtagaatttaatatagatgagtttaaagattatgataatacggagtacaatatcattggatgcgatgacgataaaattgaaagtacgagtgtaaccaggtatcagaaccaaattaatctaatttttaaggcgctaaaaggtccatttgaaagcgatgatgatattaaaatagatgattttgatttttttgtttataagttttcttttaaagataatgatgataaacgtgacttttatgctgttagacgtacgaaaaagtttaaagcattaaagactggaatttggggaatgctagaaggtggagtatatagttcgcttgatacagaaaatgttttaggaaccgatagctgggtggacttttttatatataaagatgatattttgattttacaacatatatcatttgaaagaattcttaaattaaaaaacgagtttaaagaagcagctgaacgggtgttgagttcagaattattacaccagaaaatcaaaaattttgatcaacttaaaattgatgcattaaataatcagaactatataaaaagactttctaaattggaaggaactagtagaataaatttatttttaactaaattagatagaaccaaagatgctatagataaacttggattagatattgaagtagacactatggctgacaagcttgtttacaataataattctcagttaggagaatttattaatcttatgcaagatgcatattataaaacgctaattggcgaagagaacggagttgatgaacgtaaaaatttaatttctaaataa

SEQ ID NO: 96276 - DNA, 585 bp, Porphyromonas cangingivalis
gtgattaaaaaagcaggttttttcttcttgtcgctttggttgttatttgtcatgataattatcattacaataaggattcctatttgtttttcgaaagattattcatttgttggtatctcctacttgctttcaaccaatattatcccactatgttccagtttagctttgttcataggaggatgttcatatttcaatctggaaaaccaattgaaagggacaaaggaattatcctttaaaattacagagattgagaatattgattacgaacacttgacttttcttacaacatacatcattccgttagtctgtttccaatttgagaatttacgatatgtcattgtatttgttattttgctcattgtaattggattaatatatatacgtactgacatcttttacacaaacccaaccttggctcttctgaagtttagaatttataaagtgacagggactttcagaaaaagagaagtgagagaaaatataattataataacgaaagaagaattaaatatcggagatgatgtgaaatatattaagttggataaacggatttactatgcttcaaaagtaaaaacagatgaataa

SEQ ID NO: 96277 - DNA, 957 bp, Porphyromonas cangingivalis
atgaataaacaagaattagataatgcgctcgcatttatagatgcaccgcagggggagttgcaaataattctatatgcaaatatagaaggcattgcagagccgagaaaattggatataaaggaagaagatctgtctggacttcgccaattgtttgcctcaagcattaaggcttctattatagaaaaagaagactacacagtattaccgctatcaacagcagatgaacgaggcaattgtttttatcaatatgatttagatattcctgatgaattgcaactcttagaaacgacaataggaaatgataatctgcaaaatttcagtttcattgataatcagttctcaaatatagaatctctcattattgttttagcagatacagaaaatgagatttcactctttaaaaaactgtcaactgtcgaagttatcggcagaggtggatttatgctatggaagtccaatcaaagattggaaaagtttaatgatcaattattacggataagctccaagtttcaagcattaagagttggtggtgagattattatcactgatttggcttccatagaaaaaggatttggcttccatgatataattattcgagaagctactaatagtattagggttattgaggaattacggcttgtgagtaacatagatagtttggagaatttagtaagtgatgttcgttttgctcgaaaactgacaaaagttgcacggaactctccagttattcagcgaaacattcctaatgcagatataattgcattttcaaagagacacccacttactaagaacaaaatgcgatacaacgcaaatcagacccaattccttttggacactcgagtttcaaaagacttgttgataaaaatcctaaatgatgatttgctgacttcagaattaaccaagttgtattacgatagtttggcaaaagatggaattgaagttgaggaggaacaataa

SEQ ID NO: 96278 - DNA, 573 bp, Flavobacterium psychrophilum
atgttttcaaaaccattaaaaaccattttcgcaataacagcctttgcaccaatattattaatatggtggatagtgagcatattaagtgttattgataaaaaaggcgaaacaaaaattataaaattatcagaaataactttggaaaacttccaaaataaatggtatttaggtatcggttttattatttctgtgcttatttgctattttttaatatttttaattcgtaaaaaactaactcgtaattttattgaaattaaatcaattaaaagtgccgacttacatatgaataccatcttgttcagttaccttttaccttgtacagaattatataaaaaagatagcatttatatttatgcttggataattttactttttataataatctatataaaccgaaacacatatttttataatccattaatgaaatttttcggttacaggtattatgaaattgcaacaaaaaaagaaatcacatatacaatgatttcaaaagaaaaacttataaatgcggatgattgcaatgcttactcacaaatcacagattatgtaatttttaattcaactataaaataa

SEQ ID NO: 96279 - DNA, 843 bp, Flavobacterium psychrophilum
atgccgaacactacttgtaatttttttgcgatattaaaaaatgactctataaaaaaaattgatttacttcaaacaattacagagtccattagaaacgtatttgttaatgcaagtttgcatctaataaatgacgatacagaagaaatattatttgatggcaattatgcagtccaagaggaagaagttttatttgtcaatcttgaattgccaattaacttaacaaatgcaacttcaaatccaattggtttgggtgtacttgatataaatatagaccaaataaaaacattgttttggtttgaaaatggcgtttactatttccaaaactttgacaatagaaagctacttcaaaacagaaatataattttttgggatgaaacatctttcaataaatttacagaaaatgccttaattgtagaaaactacattaatggactttacaaggacaataaattttacttcaataattttgttaatgcaaacaaaatcttcaatttaagtagtttttatcaagaagcaacagataaagaaattacagaatttgtaaaaaatgacaacatatctataaatttagattggctattaaaaaattcaaattcattattaagaaagcaaataactttattagaaaaaagcggaatactaaaaaacacaaatactaaaaaggttaaaataagtgcaaatcattttaaacttaaaattgaattgacaacagacggtaaacttattttacctgaaaataaaaaggattgcaagaatgtattagcatttttaaacgaacaatattattttggagtaattacaaaaaataaatttatgtcaaattctaaaaaaattatagaataa

SEQ ID NO: 96280 - DNA, 528 bp, Knoellia aerolata DSM 18566
atgacgcgggttgtcggtttcggattgctcgcttcggccttcgcgccgatggtggctctcctagcggtcgtcaggttcgacgcgctcgggcgcgccagctgggtgattctggcagtgtgcggcggggcggttgttctcctggctgcggttctccggagcgtggcgggcatccaagcgcgaaccatcgactgccagtcggtgcgtcgggcagacgaacgggtgctcgcattcacctcgagctacgtcgttccgctcgtggttgcgctcttcggcgagtccgacacacccacgctcgtcgcaacgtccgctttggttgcgctgatggccacgatctacgttcgcgccgggctgtatcacttgaacccgacgctcgccctggcgggctaccgcctctacgaggtgacagcaacaaatggcaccgtcaccatggtgctcaccaaggaatggcagcacctgcgccaacaggggccgctggtgtgtcgatacgtgggtgacgacgtggccatccaccggaaggaaagaccgtga

SEQ ID NO: 96281 - DNA, 948 bp, Knoellia aerolata DSM 18566
gtgacggctgaaccggcccggcaagtgctcgttaccgccgtggcagctggcggtggggccctggacaacttcgtcgtgcgcggtgacgccatcgctggggccgaggtcacccggttcgacctggtcgacgacatggccgccgcagtcagccatgacgttctaaccagcattgacgccctggcccggaagcagttcctgacctacgacccgtcataccagaccagcacctcacaggtgcttgtggaggaattggaccagatcccggaactcgccgccgtcgacgccgaggtccgacgaggagatgtcccgtacacggccgacgggccgcccgtggtggccatggcccatgcagtgggtcgtggagataacagggtcgtcgcctaccggctgaaaggtccgggcatcgcgaccaggcggtccaagggcttcacgctcatcccgcgcgacggcatctaccggcccgtcgacggcgacgtgttgttctacgaaccacgtttcgacgcgttcacctgcgcgggtgtcgtctacttcagcatggtcacccttatccagacgaggctccacgctgatcacaaggcgcggctgctggccaaggacacgcttgccgccgtgacatcgaacctgaccattgatgggtttagcgatctcgagaaggcggtgatggacgacccgagcatgcgcgccaagatggcgtcggtcgcccgcctgatccacaccgaccccggctacgccaagaacctgaccaccaagaagctggtgaagttcgtcgagacctaccccgactacgacatcccggtgaccacgctcaacgggaagaaggttctggcctttgacccttcgccccagcaccggcaccaaataccgcgcctgctggccgacgactatctgcacagctacctcaccgaccgcaactacgaggccgggtccaagcaacgcctccagaagtag

SEQ ID NO: 96282 - DNA, 585 bp, Porphyromonas gulae
gtgattaaaaaagtaggttttttcttcttgtcgctttggttgttatttgtcatgataattatcattacaataaggattcctatttgtttttcgaaagattattcatttgttggtatctcctacttgctttcaaccaatattatcccactatgttccagtttagctttgttcataggaggatgttcatatttcaatctggaaaaccaattgaaagggacaaaggaattatcctttaaaattacagagattgagaatattgattacgaacacttgacttttcttacaacatacatcattccgttagtctgtttccaatttgagaatttacgatatgtcattgtatttgttattttgctcattgtaattggattaatatatatacgtactgacatcttttacacaaacccaaccttggctcttctgaagtttagaatttataaagtgacagggactttcagaaaaagagaagtgagagaaaatataattataataacgaaagaagaattaaatatcggatatgatgtgaaatatattaagttggataaacggatttactatgcttcaaaagtaaaaacagatgaataa

SEQ ID NO: 96283 - DNA, 957 bp, Porphyromonas gulae
atgaataaacaagaattagataatgcgctcgcatttatagatgcaccgcagggggagttgcaaataattctatatgcaaatatagaaggcattgaagagccgagaaaattggatataaaggaagaagatctgtctggacttcgccaattgtttgcctcaagcattaaggcttctattatagaaaaagaagactacacagtattaccgctatcaacagcagatgaacgaggcaattgtttttatcaatatgatttagatattcctgatgaattgcaactcttagaaacgacaataggaaatgataatctgcaaaatttcagtttcattgataatcagttctcaaatatagaatctctcattattgttttagcagatacagaaaatgagatttcactctttaaaaaactgtcaactgtcgaagttatcggcagaggtggatttatgctatggaagtccaatcaaagattggaaaagtttaatgatcaattattacggataagctccaagtttcaagcattaagagttggtggtgagattattatcactgatttggcttccatagaaaaaggatttggcttccatgatataattattcgagaagctactaatagtcttagggttattgaggaattacggcttgtgagtaacatagatagtttggagcagttagtaagtgatgttcgttttgctcgaaaactgacaaaagttgcacggaactctccagttattcagcgaaacattcctaatgcagatataattgcattttcaaagagacacccacttactaagaacaaaatgcgatacaacgcaaatcagacccaattccttttggacactcgagtttcaaaagacttgttgataaaaatcctaaatgatgatttgctgacttcagaattaaccaagttgtattacgatagtttggcaaaagatggaattgaagttgaggaggaacaataa

SEQ ID NO: 96284 - DNA, 579 bp, Chelonobacter oris
atgacaaacacacgtcagaagattgatctttacatcctatctctgggtttattgtttatcttctttttcattatttcggtggagcctccaacgtcctttttttttgaggagttcgagagctgggaaaatctcgtaatgaataaccctctccccgtgatttcaatattcggcctgctttattgtctgtttgcatatcttcgatttgacttcgatttgaaaggcgcgaacgaaatacctttcgaagtaaagaagctggaaaatattaactacgagcatctgacgtttcttgccacctatgtagtgccactgatcagcttcgattttgacagtggccgacaactgattgtgctggcgcttctgcttgtagtgatggggataatctatatcaagacggatttgttttatgccaatccgtccctagcgcttcttggtttccacatataccgtgccagcggtcatttcaagaacggtgagagggaaggaattacattgatttgtcgtgagcggttggtggagaaccagagggtttcgtacataaagttggatgaaaaaatttactatgtaaggagtgtcaagtga

SEQ ID NO: 96285 - DNA, 972 bp, Chelonobacter oris
gtgactacagatgaacttaaagaggctttgcgggcctactacgacgatcaaggcaatatcggcgtttgtgtgtatgcgctgatgaaagatgcaaagaatccaggccccttcaaactggacattgaagccgatgcagaggctggactcaaagccttattcatgcaaagtctgcaggatgaaattttaagtcgagatgaactttcagtccttaacttatccagtgcagatgagcgtgtcaatgccatctatatttacgatctcgacattcccgaagaactggcctcttttgaaaaagagatagcacaagataatctgcctgcactggatttaaataaaagaagtctgtcgtctatcaaggcgcttctcatcgaaattggcaataatactggtcagttagttttgtacaagacgatggctcctgtcaatatatttggtcgctcaagttttttccttcgaaagcataaaagtcgcctcgaaaagctgaatgacgaatttctgcgtgtcagtgctggcttccaaatgatgaggattaacgaaaccgtgctggtgctgaatcttgaggcactggaacgcaacttcgggtttcacgatgtgatcaaaaaggaggccgaacttggcattgatgccatcgtctcggcagaattgctgactaatccagatgtcttgcaagaactgattgatgatgtgaaatatgcccgccgatttaccaaggttgcaaaagcatcgcctgtgcttaaagcgggggtgtcaggagaaagcatcgtccagttctgcaagacatttcccaatcttgttggccgcatcaaattcaatgaagagaacaacaaggtgtttctcgataccaaggtatccaaggatttgttcatcaaggttttgatggacgattttctcacctctgaactcaccgaattccactacgccagtgtcgcaaaagatgcggtggaaccaggtgtcgaggggactggccaatga

SEQ ID NO: 96286 - DNA, 585 bp, Xanthomonas vasicola
atgcagtttcagttctggtcagcactcttcatttttttgggctcctatttccccttggccttgatcctgatggttcaagacatttcggcgaagtattggggcgcacccttgtgtggctggagagggcaatggaactgccagtttcaggtatttggtcacccgtggttggcgtctgggagcgtaggggtgaccttgggagcgctcctgttaatggtggtggtgctgcgctcggttcggttgacgcatcgcgtgcacgtgcaggaagtgaaggccattcccaatgacctaattaactacgtgctgccgtatgtggtgtcttttatggggctgagctatggggatccgcaaaagctcggcggttttctggtcttttggatagggctgttcgtgatcacgtatcgatccggtcagattttgatgaacccactgctgatcgtgttgggctggaagctttacgaggctaaggttaccttaggccaagtcggcgccgttcgaatggttagggtcttgaaaaaaggtgcgcttttgcccagtatccagatagccgaagaagtacaggacgtttatctaatgggggacccatga

SEQ ID NO: 96287 - DNA, 930 bp, Xanthomonas vasicola
atgaccgaacaagcattgagggaactgcagagttttaatcttgatgacgcaagggttcatttatgggtcttcaagtccagcacgacggtaaaccgatttactgccaactatgtccgtatagatgaagctctggagggtaggctgcgcgagttcgccaagacgcaaagggcaaagatgactgagtggattccctatggacacttggctcagcccacggacaacggctgcttgtcggtctcagctgcggacaccgactttgccatgcttcaggcactcgtggaccgcccagagctcgaacacccgataataaagcgagaccagctcaagaatgctgctggttatgtagtcaagttctatcaggaggagcgcgtgttatatgcagtgcgacgttctccggccacgtggaagactgcgtatcgaaagaaaggggttgtcaatatgacgttccgaaacggcgctctcagtgccgtgcaggaagtggatttcaccttggagccagggtttgatctgtttgcgttgaatgaatcgctgctcgtaggtaataagcgtgcctttgagtcaatgatgaaatatcgcgctggctttgttaatgcgtttgttgagcttcaggaggaagaaaagttcgtttcccttttcaccgacatggcccccttggtcgatcacgtcgggcttaatggcactcacttgcgccgcatggcggtcatccaagagcgtaggctatacgaaaaccccaaatatctggggacgctgcgccaggtgtgcgaaagacacaactggggaattcagtttgatgccgaaggattgatcattccaactgaggaaaccgcaaaggtgataatgacgctgcttctagatcagcgtctgatcagcgagatcaccgcaatcatgtatgacgtgccaggcggtcatcgtgtggatgcggttcagtaa

SEQ ID NO: 96288 - DNA, 684 bp, Burkholderia pseudomallei MSHR7498
ttgactgtactgttcaaccgtggcaaaacgcagtacattcccaagtcagctatttcgggatcaggtcatgaaacgttcaaagtaccaagccgtgccatggaaatgcgcctatttcccgcgctgatcttattcctcggctcttacttcccgctgagcctgattctgctgatacaagacgtcaaagaggcctcttggaaggctcctctgtgtcgaatcaccgagatatcctcctgctactttcccgtacttgcaaatccctatcgggcgcttgggctgctcgggatatgcgccgtgagcctcatcgtttttatggttctgatgagaaacctgtcgggctattcaagtcttgaggtcgttgactcgaagtcgatcccgaatgatctcatcaactacgtgttcccctacgtcgtttccttcatgggactggatctgggtattgacgggaagtttttcggatttctgctcttcatcgtattgatgttcgtgatcacttttcggtcaggacagattctgatgaatccgttcttgctggttgctggctggcaactctacgagcttaatatcgtaaccgaagggcacaagcgctgtgtaaaagcgctgtcgaaggagcaagttaaatctggcgataagcttgaatcctgcttagtacatgggatttatgttttacatcggggagagaaatga

SEQ ID NO: 96289 - DNA, 933 bp, Burkholderia pseudomallei MSHR7498
atgacaatacagcaggatctgcaggactttggggccttcgacatcgctcacgcaacggcgtcgctatgggttttcaagaagcgacccgcgacgggtcagatgaatccattcacaacggtatccgttgtgatgagcgatgcattgagggatcaactcaaagagctagcgaaaagttaccaagccagccatacgatcgcggaggagtacaacttgctcagccagcccagtgagggcggcttccttgccgtttcccgcgaagaaactttgtttcccagtctccaagggctgattgatcagcccttggaggaatgcttggtgaagaacgtgaagcagctgaacaacgccgctgggtatgttcttcgcctgcgccacgatgaggcggtgatttactgcgtcaaaaaagcaaacgcggactgggcaacccgaaagaagaaggggatgatgaacatcttcttcactgaatctgggctcgatatcatggacagcccttcattcagcatttctcgaagttttgatttttttgttgtaggcgagaatgttcttatggccagcaagcccgcgtttgaatcgcttctgaaccataaagacacctatgaagaggcgtatgcagagctaaagcaggagcccggattttcagccgccattgccgatttcacggtgtttgatacgttcatcggcaagaatgccactcatttgcgccgcatggctgtgatcaaggctcgcggctactaccagaaggccgattacatggctcggcttcgggaaattaatgggctccggggatggggcattcagtttgacgagcaagggcggatcattgctacccccgagaaaatgcgcgatatcttgcatgttctgctagatcatcgtcttaggtcggagctgtcagacaaccaatacgacgtgccttcgaccacacctgttgggccgtaa

SEQ ID NO: 96290 - DNA, 330 bp, Escherichia coli; identical to SEQ ID NO: 95744

SEQ ID NO: 96291 - DNA, 1008 bp, Escherichia coli; identical to SEQ ID NO: 95747

SEQ ID NO: 96292 - DNA, 588 bp, Burkholderia pseudomallei MSHR4304
atggaaatgcgcctatttcccgcgctgatcttattcctcggctcttacttcccgctgagcctgattctgctgatacaagatgtcaaagaggcctcttggaaggctcctctgtgtcgaatcaccgagatatcctcctgctactttcccgtacttgcaaatccctatcgggcgcttgggctgctcgggatatgcgccgtgagcctcatcgtttttatggttctgatgagaaacctgtcggactattcaagtcttgaggtcgttgactcgaagtcgatcccgaatgatctcatcaactacgtgttcccctacgtcgtttccttcatgggactggatctgggtattgacgggaagtttttcggatttctgctcttcatcgtattgatgttcgtgatcacttttcggtcaggacagattctgatgaatccgttcttgttggttgctggctggcaactctacgagcttaatatcgtaaccgaagggcacaagcgctgtgtaaaagcgctgtcgaaggagcaagttaaatctggcgataagcttgaatcctgcttagtacatgggatttatgttttacatcggggagagaaatga

SEQ ID NO: 96293 - DNA, 528 bp, Burkholderia pseudomallei MSHR4304
atgacaatacagcaggatctgcaggactttggggccttcgacatcgctcacgcaacggcgtcgctatgggttttcaagaagcgacccgcgacgggtcagatgaatccattcacaacggtatccgttgtgatgagcgatgcattgagggatcaactcaaagagctagcgaaaagttaccaagccagccatacgatcgcggaggagtacaacttgctcagccagcccagtgagggcggcttccttgccgtttcccgcgaagaaactttgtttcccagtctccaagggctgattgatcagcccttggaggaatgcttggtgaagaacgtgaagcagctgaacaacgccgctgggtatgttcttcgcctgcgccacgatgaggcggtgatttactgcgtcaaaaaagcaaacgcggactgggcaacccgaaagaagaaggggatgagaacatcttcttcactgaatctgggctcgatatcatggacagcccttcattcagcatttctcgaagttttgatttttttgttgtag

SEQ ID NO: 96294 - DNA, 588 bp, Burkholderia pseudomallei MSHR4308; identical to SEQ ID NO: 96292

SEQ ID NO: 96295 - DNA, 528 bp, Burkholderia pseudomallei MSHR4308; identical to SEQ ID NO: 96293

SEQ ID NO: 96296 - DNA, 588 bp, Burkholderia pseudomallei
atggaaatgcgcctatttcccgcgctgatcttattcctcggctcttacttcccgctgagcctgattctgctgatacaagacgtcaaagaggcctcttggaaggctcctctgtgtcgaatcaccgagatatcctcctgctactttcccgtacttgcaaatccctatcgggcgcttgggctgctcgggatatgcgccgtgagcctcatcgtttttatggttctgatgagaaacctgtcgggctattcaagtcttgaggtcgttgactcgaagtcgatcccgaatgatctcatcaactacgtgttcccctacgtcgtttccttcatgggactggatctgggtattgacgggaagtttttcggatttctgctcttcatcgtattgatgttcgtgatcacttttcggtcaggacagattctgatgaatccgttcttgctggttgctggctggcaactctacgagcttaatatcgtaaccgaagggcacaagcgctgtgtaaaagcgctgtcgaaggagcaagttaaatctggcgataagcttgaatcctgcttagtacatgggatttatgttttacatcggggagagaaatga

SEQ ID NO: 96297 - DNA, 933 bp, Burkholderia pseudomallei; identical to SEQ ID NO: 96289

SEQ ID NO: 96298 - DNA, 588 bp, Burkholderia pseudomallei; identical to SEQ ID NO: 96296

SEQ ID NO: 96299 - DNA, 933 bp, Burkholderia pseudomallei; identical to SEQ ID NO: 96289

SEQ ID NO: 96300 - DNA, 519 bp, Enterobacter cloacae; identical to SEQ ID NO: 95794

SEQ ID NO: 96301 - DNA, 894 bp, Enterobacter cloacae; identical to SEQ ID NO: 96021

SEQ ID NO: 96302 - DNA, 603 bp, Enterobacter cloacae
atgaaaaatgattcaaaagaaacaaaggagtatgttaggcgtaaaattgatttatatattctatcgctggctattttattctgttttttcatttttattacattaagattccctgtatgttttggtgctaaatgtgagtttatcggctggtctttgttattgaaaaataatgttgttcccttggtatgtcttggattgctcatttattgttggattgcctaccgtagatttaaatatgatactaataaaactgtagagctcccattaaaaataataaagatagaaaaaataaattacgagcatctaactttcttagctacatatattattccgttaattacctttgattttgaaaaagagagatatgttatcgttctggcagttctcttaataatcatgggggtgatttatattaaaacggatttgttttatgccaatccttccttggctttattggggtttaatatttataagttggacgttagtataactggaggtattaataaaacagggttgatattaattactaggcgacaattgaaagaaaatgacatggtaagttatattgtgcttgatgaaagagtttactattctggagattaa

SEQ ID NO: 96303 - DNA, 942 bp, Enterobacter cloacae
atggataagaaagacttagatgacaatctgagttattatataaataataaagatgatgtttctgtaattatttacgctattcttaaaagcagccctgacgcatatcgtatggatatcgaagcgagcgctcaggatagcttaaaagagttatttttagatagtattaagaataatataattgatgatggcgatcttagtgttttgcctctatcgtcagcggatgaaagaaataatgttatttatcaatatgatataggatggcctgatgagttaacctctatgcaaaatatgcttggacaaccaggtgaagccgtttttgatttcaaaacacaacaaatagaagatatcagagtattgctagtttgcattggtaatgcagatcagcaaattgtactccacaaaaccatggctccagttaatattttctctcgtactggtttttttctaaaaaaatcagctacaagacttgaagaaattaaggatgacttcttcagggtaagtgataacttccaaattattaaagtagaaaatgatttatatgtagtggatcttaaattaatcgaaaaaatgtttggttttcatgaggttattaaaaaagaagccactcttggcatgactgccattgaagggatgaatattatcactgatatagaggtgataaaagagttaatagatgatataaaatatgcgcgaaagttaactagaatagcaaaatcttctccagttatattagccaagattgaaaatgaaaaaattattgagttttgtaagacctatcctgtattaatcaacagaataagatttaacgaagatggtacaaaaatcgcccttgatactaaagtttcaaaagatctgtttattaaaatattgatggatgactttttaacttcgcaactgactcagttctattatgaaagccttgcaaaggatgcggtaaagtag

SEQ ID NO: 96304 - DNA, 558 bp, Proteus mirabilis
atagatttatatatcttatctcttgctattttgtttgttttttttatttttattacaggtaaaatacctatatgcttctcatcacaatgtgagtttattggttttttagaattattaaaaattaatgtcgtccctattgtttgcatagttttattgatgtatgcatactacgcatatttaaggtttaaatatgatacaaaacgatctgttgaacttcctgtcgaaattataaagatagataaaataaactatgaacatttaacttttttggcgacatatataataccgttgataacttttgattttgaaaaagaacgctatattctagttttagctgtattattaataattatgggtattatttatataaaaacagatcttttttatgctaacccttctttagcattattaggttttaatatctataaagttaatataaagataggtaagaatgatataaaggaatgtgtaatagttataactcgtaaaaaattaaaaataaaagataaaattagttatatagtacttgatgatagggtttattattctggtgattaa

SEQ ID NO: 96305 - DNA, 975 bp, Proteus mirabilis
atggctgtaaatataccgactaaagagagcttagatattgatctacaatattatgttaataatattaatgacattgctgtagtagtttatgctattattaagggtaataatgtacctttaagaatggatatagaatctccagctcaatctggacttaaatctttatttttaaactttatagataatgagattattaaaaatagtgagttaactatattacctctatcgtcagcagatgaacgaaataatgtattatatcattatgatattgagctccctcaggagttagtgtgcataaatactattttagagaacgagaacgagcaagaatttgattttaatacgcataatatagatgaaataaaagctttactaatctgtataggtaatgcagaaaataatattattctttataaaacaatggctactgtaaatatattttcacgagatagtttctttcttgtaaaatctgataccagatttaaagagatcaagcaggattttttcagagttagcggaaattttcaactaatcaaagtaaatggagaactttacgttatagatttgagtttggtcgaaaaaatgtttggttttcatgatgttataaaaaaagaggccagccagggaatacggtctattcgtaatatgaatttaatctcaaatatcgatgttatacaagaattaattgatgacgttaaatacgcaaggaaattgactcgcgtcgctaaatcttccccagtaattcaggctggtattaataattcaagcattatttcattttgtaaatcttatccaaccctaaaagggcgtattagatttaatgaagatgacacaatgatcactttggatacaaaagtttcaaaggatttatttattaaagtattgatggatgattttttaacatctcaattaactcagttttactatgatagcatcgccaaagatgcgctgattgctgaatcagttgatagttaa

SEQ ID NO: 96306 - DNA, 636 bp, Citrobacter freundii
atggcatctactaattctaacagtgcatcatacgacaatataaagttcaaatattatctttattttttatctttgtggattttatttttatctgtttcaataatgtcctttgattgggtttttattgcaagattggttaggtttattttattgaagtatacatttgaggatgtatttaacaactttgacaagttaaaagtcaggaattttgtttttattttctgtatttcgatggttttctcgggtatttcatctgtattatatttattttcatcgttatcaagaggttggggaagcacacataaagtaaataacgttaaaaatcaaacgcatgaacatctcgaatttttaactacttatgtaatgcctcttgtattcactgacgttaatagcaaaagaacagtaatcaacctgctgctgatgatttgttttatcggtgttatttatgtaaggacaaacagattttatgccaacccatcgttggcaatacttggcttcaggttatataaatgtgttattaaaaatgattcttctggtaaggagtacacagtaatatgtagggggaaaatgtctaatgattgtcaagttaaaataaagaagattgatgatgatactttgatcgcaaaacttatttga

SEQ ID NO: 96307 - DNA, 1008 bp, Citrobacter freundii
atgaaaaatgaattagaggccttcgttcaaagtaatggtcttacaggtgagatgtttttcatcataaacgataatgacaactatatttaccgacgtgttattttacatgatgaaaatactgagcctctcatcactgaaaatttcaaaaaatctatcactgatgaaattataaagagaatatctgttaacgataatggtgatgcaataatagataatatcacggatatgaattatgaagataaaggtgtttactgttttgatatcgccagcgaagataaaagcactatcattaaaataattgaagaaatatcgtcattgacagttgctgacaaccctattgactttaaatttaatgacgtaaatctcgataacattattggtcttgtttatcacatgagtgatggtgataaaaatatatttttgtatcaacatagataccccaattttttacacaagaagtcaaggctctcatttttaggtgagggggatgtattagttcctataccttacgatatgataaacatatccaaagtaattgatttttttgtttttgatggaattagttatgctattaacattaaattattagaagaaagatacggacttactcaagtaattgacaatatggtttctgaagtaacaccaaaaatcattgaaatggagattgtcaataagtctgtcttaaccgagccagagaaaatcttcgacgacatgaaagatgatcgcggctttatgagaaaattagccagagttcttaaaaacggaatattggaactaaatatcgatgttaacattgttaatgagataaagactagcttccctacaataggaaggaatattgatctaattaatgatggcaatggtatacaatatataaagctgacaagtaaagcacgcaaaaaagctttcattagattgttgaatgatgaagccgtacgttcagtcttaacacaaaagccatcgattgcacaaaatcacaaacctgaaaaaaatattactcccgtatga

SEQ ID NO: 96308 - DNA, 588 bp, Aeromonas hydrophila
atgaatactaaggagaagataaagctttacattctttcacttatgttcctatttgttatggtgatttttttatcaattaacatagagcctccatcttcagatagtgaacttaaatataacattgctatatattatatattgtctaattggcttcctatattgatgcttttctccatcatatattgtgaatttataagacgtgaatttgactttgaacttaatggcagtgctagtgacagtttattggttattgattgcaaaagtgaaaattatgagcatttaagcttcttggctacatatattgttccatttgcaggactcaactttgattccccacttaagctacttgcttatttattcttattagttgtgataggtataatctttgttaggactgataaatattatacaaaccccacactctctatttatggatacaagttatacagggccaccttggccgatcatgtaagccattaccattctgtaatcgtaataacaaaacatgatttaaaaaaagggcagaacattgcctataaatttatctcagaagatgtatgctttgctaggaaaataaataatgactag

SEQ ID NO: 96309 - DNA, 960 bp, Aeromonas hydrophila
atgactagagacagcattaaagttgacatgaagaaaattctggacacatgtacagggattaaagttttctttattgatgatgataataacgaactatatgattcagatattgaaagtgaggggttggatgaatttatgattggctttgtcaatgatctgaaaaacagattcactgacaacgagaaactttcaattccaaacctatctaatgccgatgatcgaaaaaatgcgctttattattttgatttcgatcagcgaattcatgagttcaattatttagacaaagttaacgacatgcaagccaataaaatcattggcaaataccaagttaaaaataaaggtctgtcaagtattaaagctgtcgtcataagactgaaaggtaatgatggggacgtaatctcattttatcagtacatacatagaacagctctatggacttcggggaaaggtgtattctttaccacccataaaacccgagttgtaaaaatgacagatgatgttttgagactgaacaacaattttatctttgctaaaatagggcaaagctatttaataaacaacattaatgcatttgagaaagagctagggtttgacaaaataatacatgctaaggcagagcaatactgttcaagcattgaatcacgtggtcttgtcaataatctagaaaagtttaataaacggctaagcaatgagacttactttgcaagaaagtttgtcaaggttttcaaaaactcagctgttatcgagcaagaattatctaacgaagaaattatctcattcgctatgagtaaacctttctatgaaaataagctcaagctaacagaagatgggggtcagtttgacttaaatagcatacagcgctgctcttattttctgcagttattagatgatgagtttttgaagtcagaattaacaggcatgaattatattgccagagcaaaagatagagcgggctcttag

SEQ ID NO: 96310 - DNA, 585 bp, Xanthomonas axonopodis pv. phaseoli
atggagttcaggctgctatcagcgttcctccttttcatgggttcgtatctgccgcttgcattgattttgctggttcaagatattccagcgaaaatctgggtcatgccggtatgtaagccttggcgaggcgatgcttgctcattttctttttttgatcatccatgcttggcgattggcggcgttatagtcacagcgttctgccttgcatggacaatgcatacgttaaaagcagttccaagacggttcccggtgaggatcgaagaggttaaatcaattccgaatgacttaatcaactatgtatttccctatgtcgtgtcgttcatggggttggcttatggggatccttctaaaattgccggtttttcagtatttctctttgtcttgttcttgatcacttatagatcaggtcaggtatttcttaatcccatgttgattgtgttggggtggagattttacgaagtaaagatgaagttggttcagtccaatgaagtgatcgtggcccgtgtattaaagaaggggctccttagcattggcgaagaacgcgccgaggcggtgcaagatgtttatattatgggggatatatga

SEQ ID NO: 96311 - DNA, 924 bp, Xanthomonas axonopodis pv. phaseoli
atgacgcaggatgctttcgaacgtttcaagaaatttgactttgataaagccgatgtttatctgtgggtttttaaacgtagatcagctgagaatgagaagtatactgcgcatcatgtcttgatcgacacaacgctcagcgaaacattgaagggttttgttaagtctgaaaaagaacgaattaccgagtttcacccttatgggcatttggctcagactaatgaaaacagttgcctctctgtcggaatcaatgagacaaattttcccatcttaaaaaatttagttgaccgtccagaaacacaacatacagttaaagagacaaaggaattgcgccgcgcggttggctattgcgttaaatttgtccatgatggagaggttgtttacgccactaggcgctctcccaacacatggagaacggcttataagaaaaagaacatgctgtgcatgaatttcgtgaatggaggtttagaggcaatagaaggcgaagaattcacattggatcctcggtttgatatgttttgcattggaacagggatcttggttgccaataagggcggctttgagtcaatgatgcaatatcgagccggttatgttcaggctttcaatcatctccgcacacagcctgagtttgtggctttattcaccgatatgcagccacttatcgatcacgttggaaccaacgcgatacatttgaggcgcatggcggtcatccaagaaaaggccttatacgcggatgcggctttcattagtgcacttaaaacagtggcccaaaagcatagctgggctatccagttcgacgcatcgaacaagataatacctaccccggagaccgctgctctgatcatgaagttgctattagatcagcgtttggttagtgaggtcactcatatcatgtatgatgtcccagatgcggtgagagtccagtag

SEQ ID NO: 96312 - DNA, 579 bp, Sphingomonas parapaucimobilis NBRC 15100
atgcaattcaggctcctgactgcgattatggtattcctggggtcatacctgccgttggcagtcattctgttctcgcagaatgtcgattacgcagcgtggcgacgtgctttttgttggcctctcgaatccggtggctgttccctccccatcaccgaggcatggtattcgctgactctgcttgtagttactctcgtctgttttggtatgacgatcctgtcgctggcgcttgttcgtccgaaacaggacgtcatcgttagagaggccgaatacgtcccgacagacctcatgaactatacgctgccgtacattgtgtcgtttatgggaataaactacaatgaaaccagcaagtttgtaggtttttgcgtatttttagcatggatgttttggattacccatcgctctgggcaaatccttctcaaccctgttctgattgcacttggctggcggctttacaacgtcacctacaattttcccggcagttcggagcaatacaaaggtcgggcgctcgtcagaggctatctcgatcccggacgttacaagcaatggccggttcaggacatccagatcatcaaaccctag

SEQ ID NO: 96313 - DNA, 924 bp, Sphingomonas parapaucimobilis NBRC 15100
atgccgattccagcagctctcacccagttcaacattcagaacgctggcttgaccgtatggctctttaagaagtcaggcggcggtgccggctcagctccgacttacacaggtcgctggatcacgaccgagccggatctggatgctgcgctcaaggcttccttgatcgccgctagagcgcgcatcacagaagttcacgaatatggattgctcgcccaaaataacgaggcgagcgcgcttcttatcgataccgtcgagacgcatgcaggcttgatcgttgctcagtcggccaatccagtcattcaaaaaaaggtcaggagcgagaaagaggtcacaaacaccagcttcttcgtggttcgtctgacggacggagacaaggtccttctgtcggtacgaaaaactgatgcctcctggaggagtaagcagcgcaaagggattattgacatcggctttcgcgacaatgctctggaattggatcaggctccgagcttctctctatctaaggaagtcgacttcttcatcgtcgatgataagatcatcatcccccataagggaaatttcgaatccgtcctaagctatcgtcaagcacacgccgaagatttcacaagcctcaaagcagagcccgagtttacgcagatcttcaccgaccttgcgcctctcactgcatttgtgggtgacaataaaatccaccttcgtcgcatgtgctcaatccggcagaagggtcattacaaagaccagaatttcatggcaaaactcaggcagcatcatgccgcgaacagcctgaatctggactttgatgtgaatggtctgatcgtatgtaccgaagaaagctgcagcgatatcatcacggctctgctggatcatcggcttgcatcggctttctcgaccaacgtctatgacgttcccgatgcgacgaaaatcgcatga

SEQ ID NO: 96314 - DNA, 522 bp, Sphingomonas parapaucimobilis NBRC 15100
atgttgaacgctcttgcccggatcctgctgacaagttccgccatcgcgccggtcggcctcacttatgcatgggtcgcctacacacagaatgatcttcgtgcggcgctttatattgcgatcgggagccttgcgacagtagcgatctgcctgatgatgcttcgctatgccaaaaagaaccttgaaataacgttgtttcaggcaagcgaggttgaggcggccgatcgggagaatatgggctttctcctgttgtatctcctgccactctttacatcacagtttaatacgttgaactggcagctatggattccgacccttggtatcttcgccattattacggcgaccgggtataactatcacttcaaccccctactcggcatccttcgatggcacttctacaaagtgaagtcgcgggagggcgtgacatatgtcctgattaccaagaagcagatacgatccgccgccaatcccatttcggtcgggcaactgacggagtatattctaatcgacctggaggatgcctga

SEQ ID NO: 96315 - DNA, 864 bp, Sphingomonas parapaucimobilis NBRC 15100
gtgaacctgtttgccctgtgtcgaccgagcggggctctcgaagtgaagcgtgtcgcattggcccagccggttcaggcaaaggttggcgggatattccaaggtcaggccatcaatttcctgcaaaacgtcaacgaagaggtcgagttttctggaggctggaagccggacgatgacgaaattctcgtcatgaatcctccggcagaagcagctgtcatcgccgcggcgcagacagccaacccgatcagcctgcccgagatcgacgcatcgaatttcatggcggaagggatccgcggtcttttcatcattgatggggccgggccagcgcagcgggttttgatccaggccttttccgcccagcagcttctctcacgccggtttacgctgtttcagtcgggtaattcgttcaaggaactcaccgaacctggcttcacgctcgacaacggcattgtggcgatacttgaggctggaaaactcaagttcaagagcttccacagggttcgaggtatcttcgatctccaacaattctaccgcgaggcgaccgaccaagacctcgatacattcagtcagcacagcagcctcgagatcgccgacgtggcagctttcaaggtagtggcggatcagggcattcggaaacttgttcacgcgataacgaaggctgacgtcctcaataaccatcaggtcgcggtcatcgctcagaaggcggccggccttggtatcaacgtcgtcgttcagaacggaaagctcgtcgtgcccgcggatcgcaaggcaatcaaagacctgttccgctttctggacgatggtatttatcaggctgctttgagttcatctcgctatgtgactaattctaagcggcttctgccctag

SEQ ID NO: 96316 - DNA, 567 bp, Enterococcus faecalis
atgttatataaattaaacttatacatatcttcatacctgccattgtattttttgctggtgtataaaggttgggatgagttaaataaaaatggaacacatgaaataccgacaaaagtagttttggtttatttttcagtactgataatactaatagtattagggggaggaaccatatgttgctttttacgaaaaaatcctgacaaaacggaaaaaattcaaggttcctttagttctacaggtgacaatgtaataagttatataatgacatatttgagtcctatgttatctattgaactcgcaaacttctctagtttaataatcaatctaagtctttttattttgataggtgttttgtatgtaaaaaataatttaatttacttgaatcctgtcttattgattttagggttttatatctatgaatgggaaggtaatggttgtaagaaagtaattataacaaatatgactctttctgagctaaatgctagtagcaaagaaggagactatgttaaagctagaaagtttgagaacgatatttggctctataaaaagataaaatcaaaaaagtaa

SEQ ID NO: 96317 - DNA, 948 bp, Enterococcus faecalis; identical to SEQ ID NO: 95599

SEQ ID NO: 96318 - DNA, 615 bp, Escherichia coli; identical to SEQ ID NO: 95636

SEQ ID NO: 96319 - DNA, 1023 bp, Escherichia coli
atgttaaagcttgaagaattattagagtatgctgagcaacttaaggatgatgatgcggcgaaaatatcgttgtatttcattactagacatcttaaagcgggtatgagtagaaccgcaagagttgttgataaattcgattttaaaatcattaaagctccaatcgctccagatattgctaaattttttaagtatactttatcaaaccagattatttctcatgcttcgaaagatgatattgtgatgaaaaagtatactgttattgatgatgatattgataataagatttatgcctatgctatgaataacgcgatatcgttttcaaaagttattaataacgatataaagaatgataaaccagttgtacttacctctcttgctgaggttcagaatgatttgtgggcctattgtattaaagtccaaaagggggctgacgtcacttattctttccgaaaaatcagcagggggaaagtcacaacaaatgaaccacaaaatatgactcagcgcgtattcgctttgtttgataaaacagataaagagttaagatcatttgatggcagcgcagtcaattttgatgacaaaatcgattgtatttatataaaagatcaattttatgtatttcataagaaaagttttgaggctattgtaggcttggaggttgagtttacagaagctgcacaaaaaacattaaatacaattaaagaacttgatcttattgaaggtttagatgttattgaacaagctattcttcataagccatcactgagaaaaattctcactcatatcgctgagaaaggtaaccatacggttctggaaaagaatgatgttcaagctatgaatgatgtgctaaaaatgtttcagaacgaagagtttaagaccaatgagcatggtaaattagtcatagaagatgagaggcaaggaagaaactttctcaaactgttaaatgattattataaacaaggcatgactacaaaaaaatactatggtacggatagcggaaatgtgattaaccctattaaggcgtaa

SEQ ID NO: 96320 - DNA, 615 bp, Escherichia coli; identical to SEQ ID NO: 95636

SEQ ID NO: 96321 - DNA, 1023 bp, Escherichia coli; identical to SEQ ID NO: 96319

SEQ ID NO: 96322 - DNA, 615 bp, Escherichia coli; identical to SEQ ID NO: 95636

SEQ ID NO: 96323 - DNA, 1023 bp, Escherichia coli; identical to SEQ ID NO: 96319

SEQ ID NO: 96324 - DNA, 612 bp, Listeria monocytogenes SHL011; identical to SEQ ID NO: 96206

SEQ ID NO: 96325 - DNA, 942 bp, Listeria monocytogenes SHL011; identical to SEQ ID NO: 96207

SEQ ID NO: 96326 - DNA, 534 bp, archaeon GW2011_AR13
atggcaggaataaaactttgggttaaattccttatgtttgttagttcattttctccattaatgataatttggggttttgagttcaaggaaatatttttttggaaattaagtatttttcacattaccctgattatttccctaatttcaatagtttctcttgtttcaataatagaatcttctcgtagagataataatcctcaaagattgaagataaattcaattgaagacatgaataaagttcatatagaatatttactaacttatgtttttgtatttttgcctacaagtaatataagtatattttctttcttagtattcattatggttctcctaatagtgtatttaaaatcaaatcttatctatgtaaatccggttttatccctactattttatgatgttgtaaaattaaaaagcgaagatgaggagattattcttattactagaagaaaagataatcttataaaaaatgaaaacatcaaaatttcaattttaagtaaagacgtttttgtagaaacaaaagaaaatgaaagataa

SEQ ID NO: 96327 - DNA, 975 bp, archaeon GW2011_AR13
atgaaagataaaataaataatttgaggtctaatttggagaaagaagagattacaattaatttgtatactttaaataggaagtatcaggtaaaaagtttagagaaaaaatatgttgtaaattttgctacaataaaaggagattctaaagattatattttagagaccattaaaaatttcttaaaaaataattcagaaaaaataaaagaaacccaagattatttcgattttaatatagaagacggagattattatttatcaataagctctgataaagtaaatgaatttgaatttgtgcgtaacaagatgaaggctaaaagtagattgcctgcattaaacaaattgacaaataaaacaactgttcttgcaattgagttgattatagaagataaccagtatgttttttttcagaaagtagatatttctccaagaatgaaacgaaaattcacaagcatgatattaaaaaatggcgttttcaacaaaattgtagaacccaaatcagaggaattagaatttcccccttattttactttcttgtattttgaggattcaaaagaatttttgatatttaataaaagaaaatttgagcaaagttttgattttagaaagttctataaagataattcagaaaaagctattttgaatttagaggggaaaaaatttattttttctaaagaattaaaggaaggttctcttactcagccaagatatatggcaaaatttactaagattttactttgtaagggaatagaaaatttggagaagagggatttgactccttatgaaaaagaatttggaattaaaattcaaaaagatgaaaaaggcaattttctaattaaaacagaggaagatctagatgggcttcttaaaatattgcagaaggaatgtgtagtagaagtatcaacaagagaaaaatttttcagtaagagtaagattagtgtaacaaatcttctaaataaaatcaaccctttcaaatga

SEQ ID NO: 96328 - DNA, 645 bp, Salmonella enterica subsp. enterica
atgtatgtcttgtctttgttttttttgtttataccaataattttttatttttctggtattgatgatgtctggaacgtttttaccaaagctaatggtttttgtgatggcgtcagtaatcgtattgtctgtataacaggtaatatgggcaaccagctatctctatccgtgtcaaggttatgcgtttgtatttttttggtctttttgtgtggctatacttactggtggtataagagacagctttcatttttggatagggggattacctctgccgaagtggttgttgttggatgcgaaaaagagtcaactgagtatctgtcatttttgtcaacttacataatgcccctggtttttacagacttaacaaaaccttcaaatgtttttaatttcatttttattctagttattgtcggatttcttcatataaaaacaagaaggattcatagcaacccaacgctttcattgtttggtgtttctgcttacaaaattgactatataatcagggttgatggtcaggattctgatatcacaaaaggattgattgtcctgtcgaaggatgagatatctgtgaaaagtgtaattcgaatcataaaaaaagaagactacattacattcgcaaaatacataaggaacgattcaaatggctga

SEQ ID NO: 96329 - DNA, 1146 bp, Salmonella enterica subsp. enterica
atggctgaagaaaaactggatttaagcgagctccatcatgacgcgcagaaggcctctgagctctcatcctattactcccacttcgatacaaaggtagaagattttgaccttcatgtatattttaactttaggcataagataaaggacggtgatggaaagtaccgttacgaatatcgggttgcaaaaatagatgatactactgttctgaaagaatcaatcaaagataacgtgataacaaaaacccttaatgatctaagtagcggtggagttgcagtatctgatataaagcagcttagtgatagggctagcactatatcatttttagaagatgcaaagtcatacaaagatgaacagatgtcttttttgacaggtattatttttgataagggatttggaggtgatggggatattcctgtcgtcaattttgagaagtttgataaaatatcaaaggttgactcaattgtttttgtcttaaggaaaggtgataaatgtataacaatatacaaaaaacaatatcctatacagaacctgaccaaaaagaaaaatcattacttcttatatagcaaagatacgttatcaaaaatagatgctgacatgatatcaattgatggaaaagcctctattgtttttgttaaaggtactgcatatatctatgatcaggatgtttttgagaaatttttcggatacaagaagtggataaaaaaagttgcgggcgaatttgtttctgaaatgaagcaaaaattttcatcgatagtagactttggaaaagttaccgacaggcttgaaaaagaaagtgctgatgcagatgccttttcaaggaaactggcaagaatatataacaataaagatctaagagcttcctttaatactgttacaccagaaaaaatcagtgattttttagttgaaaatgagtatttcgctagattgctaaagtacaaatcagcggaagaacctttagaagtatcaacccatgatcagcaggaagcatttatattaatagtttctgagggcgttcttcgctcgcttattactggttttgattatttaagccctgccgcgaaaagaaaaattgcgacaggccaaaccgcgcaaaaaccttcttctgtagtaactaggataccctccagcgcatctgacgccgcctaa

SEQ ID NO: 96330 - DNA, 591 bp, Novosphingobium subterraneum
gtgcaattccgacttattacggccctcatcgtattcattggatcctatctgccgctgagcctgattctcctcgcgcagaattttgatttttcggctgttagaaatcagttttgctggccgataaatgagaatgcatgtgtaatcccaataaaaagtccaatattctcgatcgggttattttcgctcactctcctctgtttaggcgtcaccctcgtggcattacgagctattcgcccatcaattgatgtggaggtcatagaagccgagtacgttccgacggatctgatgaattacaccctgccctacgttgtctcgtttatgagcattgattatcaagagacaggaaagttcattgggtttctcgtgtttctcgtttggatgttctggatcacgtaccgggccggacaggtaatccttaaccctgtcctgatcgcgctcgggtggaggctttacacaatcagttatcgcttcgcaggaagccccaacgtcttcaagacgagcgcactctccaaaggtcacctgaatccaggcagtcacaagcaatatccactgcaggaaatccagatcatgaagccggaggttccagcctga

SEQ ID NO: 96331 - DNA, 924 bp, Novosphingobium subterraneum
atgccgctaccccaaaaattcgcagatttcgacattcccaatgcaggtgtcaccgtctggctgtttaagaagtcgggcggtgctggtggcgtcgcccccgtctttaccggtcattggatcgcgactacggacgagctggaggcagcgcttaaagaggcaatagctgaggcgcgcgacgctattgaggaggtcaacccctacaaccttctggcccagaacaatgaggctagcgtcctcaatataggaacgcttgagacgcatgccgaccggattgtcgccgcctccgccgatgctctgcaacagcggaaggtcagaaacctgcggcagatacaaaatacagacttttacgtcatcaagctaacgagcggtggtgacgtcctgcacgctgtgcgcaagacagatgcttcatggcggtcgagcagacgcggaaactacattgatgttttgttccgcgacgaaggtctggaacttgacgatgctccgcaattctccctttccaaatacgtagatttcttcatcgtggatgaccaaatcctgatcaaggagaagaataagtttgagtcgatcgtgagctatcgccaagcgcatgagaacgactttgccgaattacaagccgagcccctgttcgcgggccttttcacagacctcgcaccccttgtggcgtttgttgggactaacaaaatacagcttcggcggatttgcgctattcgtcagaaggggcactatcaggatcaggcctttatggctcgactccgacaacaccatgcggaataccagctcaatctcgtgtttgacgcaaatgggcgaatccagcctactgacgaaacctgctcggacattattaccgcccttcttgaccataggttgtcatcggcgttctcggagaatgtttacaacgtaccagatgctacacaggtcaattaa

SEQ ID NO: 96332 - DNA, 600 bp, Pectobacterium carotovorum subsp. carotovorum
atgaaacgaaaaagcacatttaacaagatgggactttacatactatctttaatgttgctgtttgtttttattatcattttgagcgcaaaaatcccattttgttatggctccacctgccattttataggattttatcaattagctttcagtaacataataccaataatttgtttaatttttatagggatagcattttatttctatagaaggttcaaaggattgacgaaggtcaacaacgctgattgtgtaacaatcactgcttgccaaagtgagagttatgaaagtttgactttcttagccacatacatagtgccttttatgggattcagttttgatgaccctcagaaaaacctcgcttactttctcttaatagttgttattggtttaattttcattaaaacggataagtattatgcgaatcctactttggccattttcggttataagctgtatagagttaacatttcttattcaggaagcagtgaagtaaaaaacgtcattgcaatctcgatggatgtgctgactgttggcgatcaagtactctacagtttttttgatgactacgttttcatagcaaggaaaaaagatgaatccagatga

SEQ ID NO: 96333 - DNA, 960 bp, Pectobacterium carotovorum subsp. carotovorum
atgaatccagatgatttgaaggtagaaataaacagcattttcgaaaactactcaggaattagagtaatcttcattgtaaaaaatgaagagaactactctttaaaactttcaaaaatagataataaagcatttcctaaaatcattgaaggttttaaattaagtctttcgcaagacattattgagaacgaagatctaactatccctcaactttcaaactttgatgatcgcaagaatgctttatttttattcgactatgagcaaaagcctttagaatttgattttataacatctgctatagaaatcccacctaactcacaggatttctataattatgaagataaattcagaaacatcaaagggataattattcagatacgtggtaataataagtgcttatcgctctacaaaaacaaaacgccaataacagtttttgagcagagtcgtaaagtattcaatttagttccagacccggatggtttccttaaagaactgcctgagcaagttttcagattggatttcaactatgacttaatacttttagatgacaactttattatcaaaaatctaactactcttgaaagaactatgaaattccatgaggttattcaagctcaatcggttattgctttaacagcattaaaagaatcaaatcttattgaagacctttcacatctcgaaaaaagctcatctgaaatgtctttctcaagaaagctggctaaaatttctaagcactctccagtattaggtaagattgatgtgcctgtaatcattgagtatgtaaaacaacactcattcctctcaactgtcatgatagttagcgatgatggtaatacgctgatagttaagacaaaaagatcccaaaaacactttattaaattgctcagtgatgactatttagaatcacctctcactaaaatactctatgattcattagctaaagatgaactaaaagcaaactga

SEQ ID NO: 96334 - DNA, 600 bp, Pectobacterium carotovorum subsp. carotovorum; identical to SEQ ID NO: 96332

SEQ ID NO: 96335 - DNA, 960 bp, Pectobacterium carotovorum subsp. carotovorum
atgaatccagatgatttgaaggtagaaataaacagcattttcgaaaactactcaggaattagagtaatcttcattgtaaaaaatgaagagaactactctttaaaactttcaaaaatagataataaagcatttcctaaaatcattgaaggttttaaattaagtctttcgcaagacattattgagaacgaagatctaactatccctcaactttcaaactttgatgatcgcaagaatgctttatttttattcgactatgagcaaaagcctttagaatttgattttataacatctgctatagaaatcccacctaactcacaggatttctataattatgaagataaattcagaaacatcaaagggataattattcagatacgtggtaataataagtgcttatcgctctacaaaaacaaaacgccaataacagtttttgagcagagtcgtaaagtattcaatttagttccagacccggatggtttccttaaagaactgcctgagcaagttttcagattggatttcaactatgacttaatacttttagatgacaactttattatcaaaaatctaactactcttgaaagaactatgaaattccatgaggttattcaagctcaatcggttattgctttaacagcattaaaagaatcaaatcttattgaagacctttcacatctcgaaaaaagctcatctgaaatgtctttctcaagaaagctggctaaaatttctaagcactctccagtattaggtaagattgatgtgcctgtaatcattgagtatgtaaaacaacactcattcctctcaactgtcatgatagttagcgatgatggtaatacgctgatcgttaagacaaaaagatcccaaaaacactttattaaattgctcagtgatgactatttagaatcacctctcactaaaatactctatgattcattagctaaagatgaactaaaagcaaactga

SEQ ID NO: 96336 - DNA, 585 bp, Xanthomonas axonopodis pv. phaseoli; identical to SEQ ID NO: 96310

SEQ ID NO: 96337 - DNA, 924 bp, Xanthomonas axonopodis pv. phaseoli; identical to SEQ ID NO: 96311

SEQ ID NO: 96338 - DNA, 519 bp, Klebsiella variicola
atgcttaatggatttgctcgctatgctttgactgctagttcggttgccccagtttgcctgacattggcattcttagcttatattaatgataattataagattcttgtttcctcaattcttttggctgtcgtaagtgtggttttttgtgtctttataatcaaacaagcacaaaaatataatccggtcacattgaaaaacttagaatcggcatctccggcagataaggaaataaccaactatttcttgacttacttatttccacttatatctggaccgaccacttttatggattggcgattagctctatttttttatttaagtcttttcttctacataaaacactcgtcttcgtatagtttcaatccaattttgtctattatatttggattcaagttctatgaagccgaagatgacactggggtgagctttgttcttttgtcaacaaaacctcttaccaatgcgaagatcaaaggtttgagggtaaagaagcttactgaacatacctatatgattgtataa

SEQ ID NO: 96339 - DNA, 894 bp, Klebsiella variicola
atggaactttttgcgattacagacagcgagataccgactagaataattaagattgacatagatgctcccgcacaaacggtagtagaaaatctatttagaactcagagaagtgagtttataaatgaagatatcgaagagatagacttttgtgcatcttataatgttcaggatggtgaaatattttctatcaatccatttgatgacgaaataggcattattaatgcaatcgaacggcctgatgctgttccggtttgggaccctgatgatgtgtcagttcattattttaaagcgttatttacgggtgagccaacttcgaatggtaatcctactcaggtttggcttcaatgtttcgacagacgacaaataattaataatgaaaaatcctttttccaagtagtaacacagcctggaaatagattctcagtgtccactcgtcctggtttttcgcttagtgatcgattaactgctatccttgtgggtgataaattattgttcaagagtttctttatgctccggcgattttttaacatggaagagtattttaatgaagctactagagaggatttagataactttatcggtaatgatatatttcatgtggaaaatgctgaggattttatgacgtttgcagattctgcaattaaaaagaaagtatctttgataataagttctggaatactcaacgatcagcctattgaaaatctaattgagtgtgcccagaagattggatatcaattaggtataactaatgtgaatggtgacaataaaatcactatgccaaactcaaaaagagaagtgaagcaactattatatttcctcgatcagggctacttcaattcaataatcacaaatgagttaatgttgacgaattcgaagcgaccaataagaatttga

SEQ ID NO: 96340 - DNA, 516 bp, Pandoraea sputorum
atgctgagcggtttcgccaaatttctcttagcgttgaccgccctttcgccggtagcgcttacatgggctattgctgactatagtcgtcgtggctttgtcagcgatcagctatttgcgatttcgatatcgttgattctggcggtcggatgtgcggcattgctgcgcgttagtagaaaaagattgacgaaagtcacattcgcagtcgatgagctaaaggcggtagataacgaggtggtcgcttacatagtcacctatttattcccgctggttgcgccagcaaccgatatcagtttgctcgcacaaggatttgttttggctcttcttgcattggtgctgtcgacgtccaatgcattcacgttcaacccggtgctaagcctcttgggttatcatttttacgaagtaaaatgcgcatctggtgtatcttatttgcttctgtcgagaaatgacataacagacgtgcgcgtcattaagaaagtcggtcgactatcgaggcaccttatgctcgacctatcgtaa

SEQ ID NO: 96341 - DNA, 876 bp, Pandoraea sputorum
atggatttttttgcgcttgttggtgggcatctacctgctgtttatcggcttgatttgcagcaggacctacagaaccgactagaccagatgttcgtggaccattccgagcagttgctgaatcctgatctagttgctgttccgtttgagcgagaaaattttcatccagacgactccgaaatattggagataaacccattcgacctaccagatctgattttcgatccaatcgaaaatgctatcggatggccggtgcttcccaatgatccggacgtgctttcccgagtctactgtgtttttgctcacgacgatgggagtgatagagtaatttttcaggtcatcaacaaagctcagcggcttaataccagcgcgatcaatatcattctgcgtggcaacgtattttctaggttggaagagccggggttgatgcttgccaacgcatgtcatgcggtatatcaaaataacgccttgcgctttaagagcatatggtggttgaagcaaatatttgatattggcgactactaccgcgcagcgactgaagctgatgtcgatgcgttctctcgactggaaaatgtcagcgtcgaaaatcttgatgcgctcaagaaccgttcggggcaatgggttaggacacgacttgcgtatattgttgactcaggtgtgttagagcagtgcccgccggagcggcttgttgagaaagctgcagaatttaacgttgatctgcagtgcgtgaatgagaatggtcgacaaaagttgctgattcccgaagctccaaggcagttgcgcaaagtcttgaagtttttagaggaagagtattacgcgggtcccatcacgggtgccgcatatgaagcgaattcgaagcgccgacgcgggcaagattaa

SEQ ID NO: 96342 - DNA, 513 bp, Geobacter soli
atgctcagtcgactgttaaagacatacttcgtcgcgacagctctgtcgccaatatgcttctccttggcctatattgcatatcagaggaagaacagcattgagctgtgtgcactttttgtaagcatagcggttctattgggggcctcttcgttcaagataattgaactggcgaagactaaactggagattctgccagtaacgataaagaaagcgaagtcaactgacaaagaagtcattggattctttgttgcctatgtgctacccatagtattcaagaattctaactttgatgcaggtagcatgacaatgtttgtgctactgttggcgtttgtgatctggggcactcattcattccaggttaacccgttactcggtgtctttgggtatcatttttacgaggtagatactgagagcggtataacattcgtacttgtcacgaagaagaagatagtaaatataaagtctatcggaagggtcgttcaattaactgaatacatggttttggaggtttga

SEQ ID NO: 96343 - DNA, 888 bp, Geobacter soli
atgccaggagtactgatgaatctgttcgctctgaccaatgtcccagagaaccgagtagctcgaattcccctatcaagagaacttcaagaagagatcacggctctctttctccaacaggagcagtcattcacctccgatatcgaagaagagatcaagtttgatggcaagtaccgaccggaagaaaaggagctcctgttcatcgaagacttcgatgatgttgatggaatatgcactgccatacgcaatcccacgggttgccaggaacttgaagtgacgtgccaaggcctggagtcgatcaaggcaatcttttctgggtacgctaaagatgacaccgtgaccgctttgttacaggcatttgatagaaagaggatcatcagcacaaaagggttcgcgatgttccactccggcaacaccttcaccaagtttgacggaagtggcctcacgctcgacaacaagcttacggctgtcatgaccggtaacacgctaagatttcagagctttcactatgtgaggcaggtcttcgatatgagcgggtactacaaggaagcaactaatcaggacgtcactgatttctgccaccacgcagcccttgcagtcgggagcgagcaagagtttctcggcgttgcagattcatgggtccgtcggaagatcgggcttatacagcaatcgggaatcttagacagatattcaccgacgcagattgccgacgtggcaaggatgtttcaaataggccttacgatagagaatagagaaggcgtggacaagattgtcctcccaatggcccgaccggacttgaagcgtatcttgagattcctcgatgaagattactacgaggcccctttgacgaccacacgctatctctcaaactcaaaaagggttgctgattaa

SEQ ID NO: 96344 - DNA, 585 bp, Xanthomonas citri subsp. citri A306; identical to SEQ ID NO: 95814

SEQ ID NO: 96345 - DNA, 930 bp, Xanthomonas citri subsp. citri A306; identical to SEQ ID NO: 95555

SEQ ID NO: 96346 - DNA, 585 bp, Xanthomonas axonopodis pv. phaseoli; identical to SEQ ID NO: 96310

SEQ ID NO: 96347 - DNA, 924 bp, Xanthomonas axonopodis pv. phaseoli; identical to SEQ ID NO: 96311

SEQ ID NO: 96348 - DNA, 636 bp, Escherichia coli C691-71 (14b); identical to SEQ ID NO: 95840

SEQ ID NO: 96349 - DNA, 1008 bp, Escherichia coli C691-71 (14b); identical to SEQ ID NO: 95747

SEQ ID NO: 96350 - DNA, 510 bp, Aeromonas hydrophila J-1; identical to SEQ ID NO: 95886

SEQ ID NO: 96351 - DNA, 888 bp, Aeromonas hydrophila J-1; identical to SEQ ID NO: 95887

SEQ ID NO: 96352 - DNA, 585 bp, Xanthomonas citri pv. citri
atgcagttccagttttggtcagcggtgttgctttttctaggttcctacctgcctttggctgttattttgatggttcaagacatcgccacaaaatactggagtgcaccactatgcggttggaaagggcaatggaattgccagttccagatccttgcccatccgtggttggcgtgggggactgtagcggtgacttttggggcgttgcttttgatggtggttgcactgcgctcggttcgtctcccgcatcgcgtgcacgtgcaagaggtcaaggcgattcccaatgacctgatcaactacgtgcttccttacgtggtgtcttttatggggcttagctatgctgatccccaaaagctcggcggcttcttggtcttttgggttgtgctcttcctcatcacttatcgttctggccagattctgatgaaccctttgttgatcgtgctggggtggaagctctacgaggtcaaggtaggtttgggtcaaagcggtgcgatcaggatggctcgagtcttgaaaaagggcccgcttgtgcccagcattcagatggcggaagagatacaggacgtttatctaatgagagatccatga

SEQ ID NO: 96353 - DNA, 930 bp, Xanthomonas citri pv. citri; identical to SEQ ID NO: 95555

SEQ ID NO: 96354 - DNA, 585 bp, Xanthomonas citri pv. citri; identical to SEQ ID NO: 96352

SEQ ID NO: 96355 - DNA, 930 bp, Xanthomonas citri pv. citri; identical to SEQ ID NO: 95555

SEQ ID NO: 96356 - DNA, 585 bp, Xanthomonas citri pv. citri; identical to SEQ ID NO: 96352

SEQ ID NO: 96357 - DNA, 930 bp, Xanthomonas citri pv. citri
atgaccgatcaagcattgcaggcgctacaggaattcgacctcgacagtgccggggtccatttgtgggtctttaagtccagcacgaaggcggaccggttctccgccagctttgtccgtatcgacgccgctttagaagacgcgttacgtaactttgctaaggcggaaagggcaatgatgaccgagtggattccctacggccacttggctcagcccacggaaaatggctgcctttcggtctctgcgatcgagaccgactttgccttacttcaggcgctagtggatcgcccagagctcgagcacgccatcgaaagcaaggatcagctgaagaacgcgataggctatctagtgaagttctcccaggaagagcgcgtgttgtatgcgttgcgccgctctccggctacttggaaaaccggatatcggaggaaaggggttgtcaatatgctgttccaaaatggcgagctgagcgccgtggagggggtggatttcaccttggaaccgggattcgatctgttcgccttggacgaagcgctgcttgtaggcaacaaacgtgccttcgagtcaatgatgaggtatcgcgcaggcttcgtgaatgcgtttggtgagcttcaggacgagaagcagttcgtatctctgtttacagacatggctcctttggtcacatatgtcggcagcaatggcactcatttgcgtcgcatggcggtcatccaggaacgcaagctctacgacaatccgaggtatttgggtgcgctgcgcgaagtgtgtgaaaaataccaatggggagtgcagttcgacaaagacggactgatcattcctaccaaggaaactgctgcggtaatcatgaagctactcttggaccagcgcctgatcagcgagatcaccgccattatgtatgacgtgccaaacggccaccgcgtcgacgcggttgagtga

SEQ ID NO: 96358 - DNA, 585 bp, Xanthomonas citri pv. citri; identical to SEQ ID NO: 96352

SEQ ID NO: 96359 - DNA, 930 bp, Xanthomonas citri pv. citri; identical to SEQ ID NO: 95555

SEQ ID NO: 96360 - DNA, 585 bp, Xanthomonas citri pv. citri; identical to SEQ ID NO: 95814

SEQ ID NO: 96361 - DNA, 930 bp, Xanthomonas citri pv. citri; identical to SEQ ID NO: 95555

SEQ ID NO: 96362 - DNA, 585 bp, Xanthomonas citri pv. citri; identical to SEQ ID NO: 96352

SEQ ID NO: 96363 - DNA, 930 bp, Xanthomonas citri pv. citri; identical to SEQ ID NO: 96357

SEQ ID NO: 96364 - DNA, 585 bp, Xanthomonas citri pv. citri; identical to SEQ ID NO: 96352

SEQ ID NO: 96365 - DNA, 777 bp, Xanthomonas citri pv. citri
atgaccgatcaagcattgcaggcgctacaggaattcgacctcgacagtgccggggtccatttgtgggtctttaagtccagcacgaaggcggaccggttctccgccagctttgtccgtatcgacgccgctttagaagacgcgttacgtaactttgctaaggcggaaagggcaatgatgaccgagtggattccctacggccacttggctcagcccacggaaaatggctgcctttcggtctctgcgatcgagaccgactttgccttacttcaggcgctagtggatcgcccagagctcgagcacgccatcgaaagcaaggatcagctgaagaacgcgataggctatctagtgaagttctcccaggaagagcgcgtgttgtatgcgttgcgccgctctccggctacttggaaaaccgcatatcggaggaaaggggttgtcaatatgctgttccaaaatggcgagctgagcgccgtggagggggtggatttcaccttggaaccgggattcgatctgttcgccttggacgaagcgctgcttgtaggcaacaaacgtgccttcgagtcaatgatgaggtatcgcgcaggcttcgtgaatgcgtttggtgagcttcaggacgagaagcagttcgtatctctgtttacagacatggctcctttggtcacatatgtcggcagcaatggcactcatttgcgtcgcatggcggtcatccaggaacgcaagctctacgacaatccgaggtatttgggtgcgctgcgcgaagtgtgtgaaaaataccaatga

SEQ ID NO: 96366 - DNA, 585 bp, Xanthomonas citri pv. citri; identical to SEQ ID NO: 96352

SEQ ID NO: 96367 - DNA, 777 bp, Xanthomonas citri pv. citri; identical to SEQ ID NO: 96365

SEQ ID NO: 96368 - DNA, 585 bp, Xanthomonas citri pv. citri; identical to SEQ ID NO: 96352

SEQ ID NO: 96369 - DNA, 930 bp, Xanthomonas citri pv. citri; identical to SEQ ID NO: 95555

SEQ ID NO: 96370 - DNA, 585 bp, Xanthomonas citri pv. citri; identical to SEQ ID NO: 96352

SEQ ID NO: 96371 - DNA, 930 bp, Xanthomonas citri pv. citri
atgaccgatcaagcattgcaggcgctacaggaattcgacctcgacagtgccggggtccatttgtgggtctttaagtccagcacgaaggcggaccggttctccgccagctttgtccgtatcgacgccgctttagaagacgcgttacgtaactttgctaaggcgggaagggcaatgatgaccgagtggattccctacggccacttggctcagcccacggaaaatggctgcctttcggtctctgcgatcgagaccgactttgccttacttcaggcgctagtggatcgcccagagctcgagcacgccatcgaaagcaaggatcagctgaagaacgcgataggctatctagtgaagttctcccaggaagagcgcgtgttgtatgcgttgcgccgctctccggctacttggaaaaccgcatatcggaggaaaggggttgtcaatatgctgttccaaaatggcgagctgagcgccgtggagggggtggatttcaccttggaaccgggattcgatctgttcgccttggacgaagcgctgcttgtaggcaacaaacgtgccttcgagtcaatgatgaggtatcgcgcaggcttcgtgaatgcgtttggtgagcttcaggacgagaagcagttcgtatctctgtttacagacatggctcctttggtcacatatgtcggcagcaatggcactcatttgcgtcgcatggcggtcatccaggaacgcaagctctacgacaatccgaggtatttgggtgcgctgcgcgaagtgtgtgaaaaataccaatggggagtgcagttcgacaaagacggactgatcattcctaccaaggaaactgctgcggtaatcatgaagctactcttggaccagcgcctgatcagcgagatcaccgccattatgtatgacgtgccaaacggccaccgcgtcgacgcggttgagtga

SEQ ID NO: 96372 - DNA, 585 bp, Xanthomonas citri pv. citri; identical to SEQ ID NO: 96352

SEQ ID NO: 96373 - DNA, 930 bp, Xanthomonas citri pv. citri; identical to SEQ ID NO: 95555

SEQ ID NO: 96374 - DNA, 585 bp, Xanthomonas citri pv. citri; identical to SEQ ID NO: 96352

SEQ ID NO: 96375 - DNA, 930 bp, Xanthomonas citri pv. citri; identical to SEQ ID NO: 96357

SEQ ID NO: 96376 - DNA, 585 bp, Xanthomonas citri pv. citri; identical to SEQ ID NO: 96352

SEQ ID NO: 96377 - DNA, 777 bp, Xanthomonas citri pv. citri; identical to SEQ ID NO: 96365

SEQ ID NO: 96378 - DNA, 585 bp, Xanthomonas citri pv. citri; identical to SEQ ID NO: 96352

SEQ ID NO: 96379 - DNA, 777 bp, Xanthomonas citri pv. citri; identical to SEQ ID NO: 96365

SEQ ID NO: 96380 - DNA, 585 bp, Xanthomonas citri pv. citri; identical to SEQ ID NO: 96352

SEQ ID NO: 96381 - DNA, 930 bp, Xanthomonas citri pv. citri; identical to SEQ ID NO: 96357

SEQ ID NO: 96382 - DNA, 585 bp, Xanthomonas citri pv. citri; identical to SEQ ID NO: 96352

SEQ ID NO: 96383 - DNA, 930 bp, Xanthomonas citri pv. citri; identical to SEQ ID NO: 96357

SEQ ID NO: 96384 - DNA, 585 bp, Xanthomonas citri pv. citri; identical to SEQ ID NO: 96352

SEQ ID NO: 96385 - DNA, 777 bp, Xanthomonas citri pv. citri; identical to SEQ ID NO: 96365

SEQ ID NO: 96386 - DNA, 573 bp, Klebsiella variicola
atgataaatgctatactgtttttatatacagatatcaatgcagataaggaggattatatgttaaataagcttgccaaatatcttcttactgctagctcagtagctcccgtatttttcaccttagctttcctgtcctatatatcaaagcactacaaattcatgattgcttacctatctctaggtgtaactattcttttattgtgtgttttgatcgtcaagtatgcaataaaccataactctgtcactaataaaaaattaacaaatgcctctcctgccgataaggaaataacaaattactttttaacttatctgtttcccttgattagcgggccagaagctttcatggacgttaggattgcgtcattttttgctttgagtttgtttttttacatcagcttttcaggctcttacagcttcaacccattgttgtccttttggggatataaatattatgaagctgaagatgatacaggcgtaagctttgttgtattatcaaaaaaaccattgctaaaggcatcaagcaatcgtattaatttgattaagcttactgattacacatacatagcaatatag

SEQ ID NO: 96387 - DNA, 894 bp, Klebsiella variicola
atggaattatttgcaataacagataataccgttggcactcgcattgttaaaattgttactgacagaccaacgcaaaatgtaataactcagttattcaatgaacaaaaaacattttttgaagatcgctatactgaaggagtagagttttcaggtggatatatcacaagcggtgatgagttctttgtaattcctgattttgatgatgttatagctgtattggatgcaattaataatcccacagcaattcccgaatgggaaccagaagatatctctgtattcaatattatcgctcttttttcaggttatcctgaagagaatgaaaaacctgcaatcgccttgattcaaagcttcgataaaagacaagtcattgataatagaagaacaatttttcacaaaccttttcaagcaggtaataccttctgtcagtctgctgagcatggcatcgtcattgataataaactaacagccattctaacaggtacagaattgaaatttaaaagtttccatatgctgcgtaggatattcgatgtggatgcatatttccgagaagccacaaatgaagagttaacaactttttcttcccatgaaaaattttcagttgctcagggatttgatttaacgactattgctgattcagtcattagaaagaaagtttccttgattaacaaatcaagaatacttgaggactactctgtcactgagttaaggatttcagcagctgaaattggtgtcgttttagatactgaaaatgctggcgaatttgagaaaataaaaatgccacaaataaggaaagacgttaaaagattattgcacttcctagatgaagactatttcacctcacatataacaagaacgctgtatcgagcaaactctaaacgtcgagaagatgtataa

SEQ ID NO: 96388 - DNA, 585 bp, Xanthomonas citri pv. citri; identical to SEQ ID NO: 96352

SEQ ID NO: 96389 - DNA, 930 bp, Xanthomonas citri pv. citri; identical to SEQ ID NO: 96357

SEQ ID NO: 96390 - DNA, 573 bp, Flavobacterium psychrophilum; identical to SEQ ID NO: 96278

SEQ ID NO: 96391 - DNA, 843 bp, Flavobacterium psychrophilum; identical to SEQ ID NO: 96279

SEQ ID NO: 96392 - DNA, 573 bp, Flavobacterium psychrophilum; identical to SEQ ID NO: 96278

SEQ ID NO: 96393 - DNA, 843 bp, Flavobacterium psychrophilum; identical to SEQ ID NO: 96279

SEQ ID NO: 96394 - DNA, 573 bp, Flavobacterium psychrophilum; identical to SEQ ID NO: 96278

SEQ ID NO: 96395 - DNA, 843 bp, Flavobacterium psychrophilum; identical to SEQ ID NO: 96279

SEQ ID NO: 96396 - DNA, 606 bp, Myroides profundi
atgaatagtagtacaaaattatatggtgttgcagaatttgtgttatttataacatcgtatataccattatttattttaatattattcaaacaattctcagagaatatagatttccttaattggggtggcattaacatagaaagtttatggttttttgctactaaatttttattttctacttttcttataattatttctattcttagtctcataggatgtaaacttttgtttttaaattttgagaaaaacataaacaatggagaaaatgttactttagtagatctaaaaaacagaaataatgaatcaataggatatatagccacatatattattccttttatatttcaaagttttagtagttggtatgaaatatttgcattcttttttcttatgctaataatctataggatttatgtaaattctaacttactattaattaatccaatattaagctttaaatattcaatttttgaaattgaatatgaagaacaaaatggaaaaaaaagaaatggattgataataatcaaagacaaacaacttgaagaggattcaataattacaatctattcaataggacacaaactattttatgcacaaaaaaactaa

SEQ ID NO: 96397 - DNA, 1020 bp, Myroides profundi
atgacaattaaagaaatttctgaaaagattgcttcaactgaatctacagatttaagattatattttatatcaagaattttaaaagataacataaagaaaaatgcgaaagtaatagataaatatgtatacaaagtatatcaagttgatattgattctgagataagaaactacttattctctctaactaatgaagaactaaggaaaataattaaaaaggatttcgaaatgttagactatgatgttataagtgatgatacccaacatttgtttacgtattcaatgcataataaagttttttcattttcagacgtagtatttaatcaactaaaaaaaaatccacctaaaatgcaaagtatagaatcgattttatcaaatgatgatgaattatgggcatattgtgtaggttttaatgatttagaaagtaaagattggatttatacttttcggaaaattctttctggaaaagtcgctgtagatgaaaaagaaggaaaaaatatacttaaaacaatcagaacttattttgatactaaaaatcaaaagcttgaattaataaaaggagaaacagtaaaccttgataaacaaatagattgtatatactatgaagaaaccttttatgtaataaagaaaataaattttgaaaacattgttggattacaagaagaatataaaaaagaatctaaaagtgttgttgaagagttaagaaagactggcaaaatacatggtctagaaattattgaggacaaaatagaatcgaccccatctattcataaaaaattaattaaaatagctaaaattggtaattacagaagtcttgatgataaaacgattcgaaaaatgaaaactgtttgtaaaaaatacaatgtagcacttaatgttaaagatggaaaattaactattgaaaatgaaagtgatattgatactattcttaaaatgttagctgattattataaaacaggagaagtttcaggtaaggcatatggtactttttcaggaaaagaactcacacgaagtcaagaatag

SEQ ID NO: 96398 - DNA, 519 bp, Yersinia intermedia
atgcttaatggatttgcacgttatgctttgaccgctagttcggtcgcccctgtatgcctgacattggcattcttagctttcattaacgataattataaaattctgggtttttcaattcttttagctttcataagtgttatattttgtgtttttataatcaaacaggcacaaaaatataacccagtcacattgaaaaatttagagtctgcttctcctgcagataaagaaataaccaactattttttaacttatttatttccgctaatatctggcccaactactttcatggattggcgattagccctttttttctatttgagtcttttcttctacataaaacactcatcttcttatagcttcaatccaattctatctatcatatttggatttaagttctacgaagctgaagatgacactggcgtcagctttgttcttttgtcaaaaaaaccacttaccaatgcgaagatcaaagggttaagggtaaagaagcttaccgaacacacatacctaattgtataa

SEQ ID NO: 96399 - DNA, 894 bp, Yersinia intermedia
atggaactttttgcgattacagacagcgaaataccgacccgtataattaaaattgacatagatgctcctgcacaaacattagttgaaactctctttagaactcaaaagagtgagtttctcaatgatgaggtggaagagatagagttttgtgcatcctataatgttcaagacggcgaagttttttctattaatcaatttgatgatgaaataggcattgttaatgcaattgaacggcctgatgctgtcccggtttgggaccctgatgatgtatctgttcattattttaaagcattatttactggtgagccagcatctaatggcaatgctactcaagtttggcttcaatgtttcgacagaagacagataattaataacgaaaaatcatttttccaagtcgtaacgcaaccagggaatagattctcagtttccactcggcctggtttttcacttagcgatcgattaacagctattctcataggcgataagttattattcaaaagtttctttatgcttcgacgattttttaacatggaagaatatttcaatgaagcaacgagggaggatttagctaattttatcggtgatgatatatttcatgtcgaaaatgctgaaaattttatgatatttgcagactctgcaataaaaaagaaagtttctttgataatcaattctggaattctaaacgatcagcccattgataatctaattgagtgtgctcagaagattggatatcaattaggtataactaatgtgaatggtgatgataaaatcactatgcccaactcgaaaagagaagtgaagcaactcttatattttcttgatcagggttacttcaattcaataattacaaatgagttaatgctgactaattcgaagcgaccaataagaatttga

SEQ ID NO: 96400 - DNA, 636 bp, Yersinia enterocolitica; identical to SEQ ID NO: 95668

SEQ ID NO: 96401 - DNA, 1008 bp, Yersinia enterocolitica; identical to SEQ ID NO: 95669

SEQ ID NO: 96402 - DNA, 594 bp, Pseudomonas fluorescens
atggaactcaggctagtattcgccgcagcaatcttcttgggctcctaccttccgctcagcatcattctgctggttcaggacctgaaggtcgagctcattagtaggcctttttgttcaacgctttcgcggatgtcgtcggagtgcgagctccctttcaataattctggccttgcgattggatttgttctctgctgcctggtttgctttctaaccaccatctttgtgatctggtgtaagcaagagcctcagagcattactatcattgagtcaaaacaaattccaactgacctgatcaattacgtagtgccctacatagtctcgttcatgagtcttgaatactcactattgaccaaggtgatgggctttgcgctattcatggtgtgggttttttggctgtcctacaaaaccggccaagtcgtcctcaatccaattctgattatcctgggttggaagttgtacgagatcaaatacacttaccagaacagcccaactgagcgcgtagataaagccttggccaaaactgagtttaggcccgccgccagagcctatatcgacgtcgagttcattcaagaagtcatagtgaaaagggattag

SEQ ID NO: 96403 - DNA, 927 bp, Pseudomonas fluorescens
atggcagtgctgcaggatctacacgattttgatctcgaacaagcaacggtcaatttctggatattcaaacgatatacaaaaggtacgccaccagagccgaaatacacgggcaaatgggtaagcctggataatgacctcaaagtggcattgaggtcgacggcagccgccttcaaagcggcgctcactgaaacgcttgaatacgggttactcgctgaaaacaatcaatcgagtgcgctcaccattcctcaggacgaaactcacgcagccaagttcgtagcggagtcgcacgaccagaccccagccaagcgaatctccaaaatggaagagctcgcgaacgccgagttttatgtggtgaagttctccagtgctcagggcaatctgtactgtgtgcgcaagacggattccacatggaagaccaagaagcgagctggtgccattcatacctttttcaaatccaaaacgctcaaacttgatgaggcgcccagctttcacatcgctaaggacttcgacatggcggtgctgaatgacaccatattcatcaaacacaaacccagctttgaatcgatactgagccacaaggctgcccaccaggatgactttactcagctcctagcccatgccgacttccaagcacttttcaccactaccgacgtggtgagcgcctacgttggtacaaatgcaatgcagcttcgcagggcgtgtgccatcaagatgaagggtcattacctcgatgcaagattcatgggcaatctgcgacgcgagtacgctaacttcggtctaaacatccccttccaagctgacggaaaaatcgcgcctacgccagaaagctgccctgatattttcaaagcgctactggatcaccggctcaaatctcacttctctgaaaagatttatgacgttcagaacaccgctgagacaggggtgtga

SEQ ID NO: 96404 - DNA, 585 bp, Streptococcus equi subsp. zooepidemicus Sz105
atgaaaaatggttatacttcaaaatggctattattcattacttcatatttaccgttatatttttggctattatttagtagtgttgattacactcagttggatttctcaaaatataaattagaaactctaaagtcttttcctaatatatttcgcttgatacttttatgccttataattatatcgcttgtcgaaataattaatctattcattggcagcggatctgaaataaaaacattgccaaaggacatggaaatttcacctgaaagcgatagcttaatgaattatgtagtgacatactttacaccattactttcttttgatctcaatgatatgaaatcggttatgatgaatgtgctactctttttactcattggattgatgtatgtaggtagcagtgcaacttatttaaatcctgttctgggtgtatttggatttaaaatttttggtgtatctggctttccgcatgctcatcatattatttcaagtttttcatttgatgaaatagaaacaatcaaaaatagaggagatgatgtgattagataccgattgggtgatggtatttatgttattaaaggaaaaaaataa

SEQ ID NO: 96405 - DNA, 972 bp, Streptococcus equi subsp. zooepidemicus Sz105
atgagtgtttttgatttgaacgaggtcattagtgacttagtgtcacttaatcaacaacaaagttttgagcaaaaaatagaaatctttcttcttgtggtaaaaaagaaagaaaatgagatatacaagcaggaaagtgataatagaactaaaagagtattgtttgagtcgttaaaatcggaattagaaaaatcgagatttaaaaatcgtgaggtgatggcttatgatgcagtgttcagtaagaaaaatactcatgaattagttaatgttggtgattatgaaaatatagcaacaaagctagaggaatttaatgacgaaaataattatttaactagtactcatggaatgaatgaaaagaaatttcacatgtatatgatttctttaaaaacagataatcataagtacaaagtattcggtaacttttccaatgttctagaactcaagaaaaaatttatatttgggaatttttcagactcaaggatagaattctcggattcgaataatatcgtgggatttagcaaaaagattgaattattagtggtagacgataagtatattttaatcaatcaagcggaggctaaatttgaatcagtctttaagatgaatgctcttttctcaggtcaagcaactaagattttggaagataatgaaaaaattaaatctatattttctgataccactcgaaataagttgattgacaaagtgaaatcagggaaaaggatggcgactagacttattaaaattacaagtgatatagatcgatttaataaaacagttgacaacattaaaaaaattgaggaaattatcaaggatgatacgcatgccttttacgataaagtaaaggatgtagtctattttgaagggcaacttactgttccagatggtaaagaagtacaattgcttaatgctatttctgatgccttttatcatgcaattttttcagaaacagataatgtagacgaatcgaggatgtaa

SEQ ID NO: 96406 - DNA, 588 bp, Vibrio parahaemolyticus EN9701072; identical to SEQ ID NO: 96174

SEQ ID NO: 96407 - DNA, 987 bp, Vibrio parahaemolyticus EN9701072; identical to SEQ ID NO: 96175

SEQ ID NO: 96408 - DNA, 588 bp, Vibrio parahaemolyticus 3644; identical to SEQ ID NO: 96174

SEQ ID NO: 96409 - DNA, 987 bp, Vibrio parahaemolyticus 3644
atgcccaaagaaaaaaaacgattaacaactaatttatttaaaaaaaggtttaaggattttatcgaagattgccaagggatctctatttacttccgtctcaaaaatgatttattgagatgtgccaacatcgacaacggagctttagataaaataaaagatgaggcgtgctcaaacctgatggaaagcattgtaggaaaccctcgctttcattttttaaggctttccaatactgatgatcgtaacccggcagatgttatgcatatttttgactttgccaaccccgacgaaattggtacttttgttaagattaaccaagctgaagaagctagcgaacaagcgcaacaagtaaactacgcccctgataggaacgcggcttttgaagatgtaaacgcaattattatcgttctagaagatagtcagggccgtaagttaactctttatcagaaaaaaacaaacttctctgtcttaaaagagcatactaatctctgtaatgttttttatgacggtgcaacgcttaagcagttagaccaaaatatattacaaattaataacaaatacatgtgtttgaagttcagtaaactattcatggtgagaaatgtcgatcaatttgaaaaagactctggttttagggatataattagcaaaaaagcaggagactgcatcacctttttagatcagtctggacttgtgaaagatgttgagcctttaaaacagtcagcaaaacaattgccgtttgctaagaagcttaccaaagtgctaatgcattctggtgttataagtgcaaaagtatctaatgaaaaaattattgactttgtcaaaagtaaagattatttggaaaaggtaaagctaaccgaagacgaacagcagttcgatttaaagctaaagtattcacaaaacaaacttcttgagatactagatgaggcatacttaaagtcagaacttacaggtcacgaattctacgtcagagctaaagaccgtaaaaaatga

SEQ ID NO: 96410 - DNA, 570 bp, Raoultella ornithinolytica
ataagaagaaaggtggacttatatattttatcccttgctattttatttgtgttttttatcttcattacatgtaagtttccggtatgtttttcatcacaatgtaaatttattgggtgggaggtgctattaaaaaataacatagtgcctgctatatgtattatcttgttgttatattcgtttttcgcctattacagatttaaatatgacactaaaaaatccgttgagcttccggttaaaatagtcaagttagagaaaataaactacgaacatttaacatttctggctacatatattattccactaataacttttgattttgagaaagaaagatacatattagttttagccgctttattggttattatgggtgtaatttatattaaaacagatcttttttatgcaaacccatctctcgcattattaggttttaatatttataaggtcgatatcaatatctctggaaatgttataagggagggtgtaatcgttataacacgcagaaaattagaagcgggtaaaatgttcagctatattgtactggatgaccgggtttattattctggcaattga

SEQ ID NO: 96411 - DNA, 787 bp, Raoultella ornithinolytica
atgactacacaggctgtgacaaaagaacgtttagatactgatttgcagtattacattaataataaagacgatgttgccgttatagtttatgctatcgtgaaaggtaacaacgcccctctgagaatggatattgaatctccagcccaaaatggactgaaatctctttttttgaatgtgattaacaatgatattctcaaaaatgaagatttgaccgtattgcctttgtcatcagttgatgaaaggagtaaggtcctatatcactatgacattccgataccggatgaattaaaatgtctgaatcaggctttgggccagccggatgagccagagtttgatttcaacgttcataaacttgaagatataaaggttctgttaatctgcataggtaatgcagaaagaaaaatgacgttgtataaaacaatggcgccagtgaacatattttcacgggacggtttttttcttatgaaatcggataccaggctgaaggaaataaaagaggacttcttcagggtaagtggtaacttccagattataaaaattagcggagagttgtttgttgtagatttgcttttgatagaaaaaatgtttggttttcatgatgtaataaaaaaagaagcagccagaggaatgcagtctgtcagtgatatgaatatccttactaatatggacgcattacatgagttaattaacgatgttaaatatgcaaggaagttaacgcgtgtagcgaaggcttcacctgtaattaatgcggggattgataacgtcaggatctgtctcttatacacat

SEQ ID NO: 96412 - DNA, 609 bp, Escherichia coli; identical to SEQ ID NO: 95574

SEQ ID NO: 96413 - DNA, 984 bp, Escherichia coli
atgtcaccgcagaaattagataaaaaaggtttagatgataatttaagttattatattaataataaaaatgacgtttctgttatagtttatgccattcttaaaaatagcccaatagcatatagaatggatatcgaggggagtgctcaaaatggcttaaaagagttatttttagacagcctaaaaagaaatattattgataatcatgagcttggtgttttatccctttcgtcggcggatgaaagaaataatgttatttatcattacgatattgaatggccagacgagttaacttccatgcaaaatatgcttggacagcaaggagaacctgtttttgatttcaacgtgcaaaatattgaagatattagagtgttgttaatttgcattggtaatgctcaacaacaaattatactttataaaacaatggccccagtcaatattttctctcgcactggtttttttctaaaaaaatccgcaacaagacttgaagaaataaaggatgacttttttcgagttagtgataactttcaaattatcaaagtcgaaaacaatttatatgtaatagaccttaaattaatagagaaaatgttttgttttcatgatgttatcaaaaaagaagccatgcttggcattagtgccattgagagtatggatattatcgctgatataaattcgataaaagaactaatagatgatgtaaaatatgccagaaaattaacaagggtggcaaaatcttcgccagtaatattggctaatattgaaaatgaaaaaataatagagttttgtaagatctacccagtgctggtcaatagaatcagattcaatgaagatggaacaaagattacgcttgacacgaaggtctcaaaagatctctttattaaagtcctgatggatgattttttaacctcacagttaactcagttttattatgaaagtctagcaaaagatgctttaaaattagcggctgacaatactaaagagaactaa

SEQ ID NO: 96414 - DNA, 609 bp, Escherichia coli; identical to SEQ ID NO: 95574

SEQ ID NO: 96415 - DNA, 984 bp, Escherichia coli; identical to SEQ ID NO: 96413

SEQ ID NO: 96416 - DNA, 609 bp, Escherichia coli; identical to SEQ ID NO: 95574

SEQ ID NO: 96417 - DNA, 984 bp, Escherichia coli; identical to SEQ ID NO: 96413

SEQ ID NO: 96418 - DNA, 645 bp, Escherichia coli
atgacatctactaattctaacagtgcatcatgcgacaatataaagttcaaatattatctttattttttatctttgtggattttatttctatctgtttcaataatgtcctttgattgggtttttattgaaagattggttagatttattttattgaagtatacatttgaggatgtatttaacaactttaacaactttaacaagttaaaagtcaggaactttgttttcattttctgtatttcgatggttttttcgggtatttcatctgtagtatatttattttcatcgttatcaagaggttggggaagcactcataaagtgagtaacgttaaaaatcaaacgcatgaacatcttgaatttttaactacttatgttatgcctcttgtattcactgacgttaatagcaaaagaacagtaatcaacctgctgctgatgatttgttttatcggtgttatttatgtcaggacaaacagattttatgccaacccatcgttggcaatacttggcttcaggttatataaatgtgttattaaaaatgatccttctggtaaggagtacacagtaatatgtagggggaaaatgtctaatgattgtcaagttaaaataaagaaaattgatgatgatactttgatcgcaaaacttatttga

SEQ ID NO: 96419 - DNA, 1008 bp, Escherichia coli; identical to SEQ ID NO: 95747

SEQ ID NO: 96420 - DNA, 516 bp, Bradyrhizobium sp. LTSP849
atgaggaatacgctcaagacagtcctcttcgtggccgctttttcgccggcgctgatcagcgttggggtggctcgtctttttggcggcagtccgttttgggacgcgatctactacgtggccgcgggcttaattggcagcctcatggtcgtttatgttctgacggcgctcaagtggagaggcgaggaattccccttcgctgtgaggaagatcgagtcgaatgacgttctgctcttgggagttgtggttacatatattttccccttccttgccagagcgtccgatattacggttggcgcgatcctgctgatcggctgtgtcgtctgggtcgtgttctggctcactgacgcaacaatacctagtccattgatgcggcttgttgggtaccgtttctacaaagccgaatccgcaaatggcatggtgtacactctgatcacgcggcgggaaattttcgatcctagggatgtgaagactgtcaaacgaatatcaggatcgatgcttttggagatcgttgagtga

SEQ ID NO: 96421 - DNA, 846 bp, Bradyrhizobium sp. LTSP849
atgagtgatcgaagaattgtgcgcattccgctgacagccgatgtacagcgcgagatggacgagatcttcagcggtcaagaacggcgattccgaacatccagcgaggagcagatcccctttgatgggaaatacaagcctgatgatggcgagtgccttttcattgatgaatatgacgatattgacgggctccacgaggcgatcgcaacccctttaggtattccccagatcgcggctgatgcagctgaattcgaaatgattagggcacttttcatgggaaaaactcatgaggggagaaggatcgcgctagttcaaaattttgataagcggagaatcttatccaacaagggattcgcgattttccattcggccgacgtctttaaaaaggtcgaaggcgttggcctaacaattggcgctaatctctccgcaatattggaggacgataggctttcatttttcaactttcactctgcgcgtcaaatttttgatcttacccagtattttagagaggcaaccgacgaggatttgaatgacttcgcgacaagtgaagctctaaaaatcaatgacctcgctacgttcattgcgacgtccgataattggataaggcgaaaggtcgcccttgttatgcagagcggcatcctggagagaattgatttcgaggcaaccaaggcgtccgcccttgtcttcgggatcaacatcgatacggaggctaacggcgacaaactcgccctggtactacccacaaaaaaggccgaacttaaaaaactgctccgttttctggatgaagattatttccagtcggtcctttcaagtacgcctcatctgtcaaattcgaagcgacgcgtctga

SEQ ID NO: 96422 - DNA, 585 bp, Peptoclostridium difficile
atgaataggttgaactatttaaacatgagaattaaaatgtttatatcatcatacttgcctttatacttaatattacttactatatattctgataaaattaatagttttgataagattaagttaataataagatttgaagataaaatagtttctttatttataatagcggtatttatccttgtaatcatctcgtttagaactttaattgatttaagaaggacaaaaggaaatgaaaatcataaatttgagttttttaataagacagaggatacaataattagctatatgatgacttatattgttccaattttatctacagattttcttagtacaaaaacaatgacaataaatttaattttatattctttaatcggtttaatgtatattaaattgaatcttatatatttaaatcctttgtggttattgtttggatattcagtttacaaatctgataatgaagttgtcatcataaccaatataccttatggtagattaaagactctaaggaatacaaatctaaaatcatcatatttaggtaatgatatttatttgatacaaagaagtgaaaatgacaatataaactaa

SEQ ID NO: 96423 - DNA, 924 bp, Peptoclostridium difficile
atgaatataagggaaataatgaatattttaaaactggaaaggtctgaagttagattatatttcactatgaagagggggataaattacataagttattctccaacaattgaagatggattacaagattacttgaaaaacttagtgtgcgaatatttattgagatttgaggatattgagcaggttatgtttagtccaattggatataaagatgaaactattgaaacttgtgacatagaatatataggatgttatgaaaaagttatagaaagttatagagaagaaaatttatctagagataatattgaaaataacataataaataaattgaatttttactgtttgaatataaaatttgaagaaaataatcaagaaaaagaaataaatttttttagaagagtaacgaaatttaaaaaattatcaagtaaaggttttatgggttttataaaaaataataggtttaaaaaattagattctaatttattaggattagatggttttatagatatagctatatatggtcaggatgttttaatttttaatcatatttcattagagaggattttctctatagcagatcaatatttagaaaaggctcaaaatactatagatataataagagacattaacaggatagataactttgaacaatttgaagaagattgtttaaatgatagaagaattacaagaactttgactaaaatgttaagtgaagaggcacgactagaaaattgctttgataattttgctaatgtcgttaatgcaattgacttattccaattagatataaatatagatagaaatggagaaagagataaagtgatttatgaaaataaagaacaattaatggacataataagattagtaagagattcttattataagagtataatccatgatagaaaaggaattgatgatagtatataa

SEQ ID NO: 96424 - DNA, 594 bp, Citrobacter koseri; identical to SEQ ID NO: 95890

SEQ ID NO: 96425 - DNA, 972 bp, Citrobacter koseri
atgttcactaacattgaaaatatttcaaaatcgaaacgcatctctggtgaagctttttttgttgctgatgttcaaggtacgatagatatatttaaggttaaccttgaacctgatgctgaaaaagatctgaccacttcattttctaaaagcttaatcaataatattattgaacctaacagaggtaaagtggccgttccacttgtatccactttattagaaagagataagcaagttttcgaatatgatcacttagcaattaatcaccttccaattgaatttactaaaatgaacaacgtgctaaatttcggtgtcaatgggaatgcaacacagtttgattttgcaacacaaagcctcacatcggtaaaagccgtaatttaccacctttgtgatggtaatggaaacagcgtagtcatttaccaacataaatatcctgtttctctacataagaaaacaaaaaaatctttcttgagtctaaatggcagaaccttagataagatcactcatgacagtattgatataaatgacactattgacttcttcttttttcagaataagtactatgcgctaaacattaagcttcttgaaagaatgtatggattagaaagtgtaatagataatcttgcaaataactcaacgccattaataataaaccttggaattgttaatacacaaggtatgccagtgccactagatattttcaaggatatgtataaagacagagcatttatgcgtagacttgctatggtttcaaaagggaacttagtaaaaacgggagtttcagtccctcaaatacaacaagttatgcaaaaattccctgtatttcaacggaatattgatctaacaggaggattaataaaccttaatactaaagatcaaaagagatattttatccgacttctaaataatgaagcatcttttgcagcacttgataactcgcccttcctggctgttgaaaaagactccgctgcataa

SEQ ID NO: 96426 - DNA, 579 bp, Desulfitobacterium hafniense
atgactattttttacaaatggttacttttcatatcatcatatacccctctttatgttttactagcaatagataattataattttaagtgtactccgatcgcttattttaaaggggtattagatgatacgtcactattagttttctggatagtaataatcactctttttgttatttcaattctttctgtaagttattttgtgtttataagcctaaatgatactagagttgccgaagacgttaagccaataaatgagagcgttcttagctatttaatcacttacgtaattcctttaattaatatgaacgtcaatagtgttaacagcttgttggtaaatctcttgctcttcttagttattggagtagtttatgtaaaaagtgatttaatatatctcaacatactgttaattcttttagggttcagagtttacaatgatcccagggggaatgtaattattacaaattacagtagagacgaattaatatctagtgttaacacgatggagcttctatcgtaccgaaacgttgtaaaaggggtctacttggttaggagaaagaaagagaaaaacaaaaaacaatga

SEQ ID NO: 96427 - DNA, 912 bp, Desulfitobacterium hafniense
atggctttggagaatataatagaaatgctggaaggggtatccgaggatccagctggaaaagtatctttgtattttactcgaaaagattataaatgtaactatacttcttttaaaccgagcatttcaattccgctgcaaaaggaattgttaaatattgcaaatgaggctttaaaagaattaagcaaaagggctgtaacgacatttaatcctactggctcactagatgatacgcttgaggttattgactatgtatatgttgatagcctttctcatatacttgaaagtttgaaagaagaaagacttcttacggacatacccgatgatatttcaaaatttaacttttactgtttagttattaagtttgggcaggatgataatatactcctgtttagaagactcacgaggtttaagaagttacaaaagggtatagtcggaagattcatttcaggtgaatttgaaaaaatcgatgcagaactattaggtatagataattttatagatataattggatgtaataatgagttaactgtagctgcccatatttcaatggaacgtatctttgatataaagacacagtaccaagaaaatgcgaagagaacactcgaaataattaaggaaacaaataagatcgagaactttgatcaatttcaagaggatagtattaatgacggtagaattattagagggctaacaaaacttttaaaggaaccagaaagggtaaaaaagagtctcgaaaaaatggacaaaattaaggatttagttaacttagttgaattagatattaaatttacagatgatggaaagatgctatatgaaaggaaagaccaacttcagaatataactctgataattagggatgcatattatcaatcgtatataaatgagcggttaggtgtagatgagatggcctaa

SEQ ID NO: 96428 - DNA, 558 bp, Candidatus Brocadia sinica JPN1
atgaagcttaggttatttccatcgatagtgatttttcttagttcttactcacccttagcattaatattaatagttaaagatttcgatttgaattcatacccttttaagcatccttattttgcttttggggttttaattattgctattttaagtgtagttgctttattttttgtcatcaaaaatatcaaaagtggttttcacataaaaatagaaaaaatcagtaattgttcaaacgaattaataaactacacaattccatatatagtatcctttttaggactcgatttaagcagattgcatgatatagcggccttttccatttttatgattttactttgtcttctcactattaaaacacaaagcctgtttattaaccccatattggcggtttgggggtatgggttatatgatatccaatttacagaaaataatgttttaaaaaatggcatattcttatcaaaacatgacttgagtattggcaagtcttatagaatacaaaaattatcaaaatttatgtacatcattactggaataatagaggaggggcaaaatgagtag

SEQ ID NO: 96429 - DNA, 936 bp, Candidatus Brocadia sinica JPN1
atgagtagcactccgaagggaaagcttaaaaaaatgaagtctttggatttggataacgccagtgtattcttatggataataaaaaggaaattaaaagataaaaaagctgattatagtgttttgaatgctgaaattgaaaataaactgtctgaaaaacttaaaaagatagtaaaggaaaaatttggtagttgtaatcaactaagagattattcccaccttactgaagatcaagacgatgatgtgttaacgttaaattataaagaaactgattttccacagatttttttaaaaatacaaaagggaagcgataatcccaaagtagaaaaaacagaagatttatttggcacatgggcttatgttattgagataaaacatgattttcagcttttaacttttacgaaagtaccagaaacctgggatttaaagaaaaagaaaggcttgatgaatttaatttttatagagaataaattcaaggatttagaagacaactcgatttttagaattcagagaaagatagacttcttctgttttgaggatatcatttttgttttggacaagaaaaaatttgaaacgggtttaaattttagagaaggaatgaaggcaaatagagacgaagtattaaaggatttcgaagcatttggaataattgatgatatagaaaaactaagagaacgagttggcgaaaacatgaaatacttacgcaaaatatcgatgataaaaaataacggctattataaaaatgaagacttcataacaagattaattcaagtaaatatgaaagaaaagtggggattaaaaatagaagctaacaaaattattataaccgaggataatttcaatgatgtcttaacaatacttaataatgatagattgaaatccccaattacagaggagacttttgatgtgcatgtaaaaagatctttaggaaggggctag

SEQ ID NO: 96430 - DNA, 618 bp, Photobacterium leiognathi
atgataacgactagatctcaagagacaaatgtaaaattgtgggtcgagatacttatttttctatgctcgtattatcctctttttctaatattatttataaaagatataaataataatacagatggtattcctttcggacttattcaatggggactgaatattagtatttggtctttaattggtttgttaatatcttcagttgccactttatgtacaggttttattatgagaaccttatttatacgttctgaaggcgtagatgaaattagacttacaaaagttagagccattcgtggtgatatgattaattatacacttccttttcttattggtttatttgcatttgattataaatcttggcagtcaattttatcattaatagtttttttagtgtttatgttcgcatttacacgaaatgagaaaatcattttacttaacccaatgttcttactcttaggaatacgtttgtatgatattgaatataaaaaagttggtcagcctaatatagaacattcagcaagtgcactatgtatgggaacagctagtaaatcagaacaaaaagtaaggtttcttgaaaattcaggaataaattttatttcagcattagttgataggtag

SEQ ID NO: 96431 - DNA, 1038 bp, Photobacterium leiognathi
atggcaaataataagtcgaatatcgtcgaggcattacaagaagaagttcagcatgaacttgatcaagctagtttggataaaaaactagctgatttaagagctattgatctttctaaagctacagtaaatttatgggttactaatgttaaagttagtaataaatccaaacgttttggtgatattaaaaatctaaaagtacattctgaatatcaagaacactttcgtcagtatgtaattcattgtattaaaggaaccgagcatattgaagaattacgtccgataacgactattcaagataataggttcttttatgttgaatcaagttcgacagatttaacacaacttatcgagcaagttgaaaatggtgagttgaccactattacgcaagaaacagagctaaataattacaatgcttatgtgattcaacttacttttgatgagccagaaaaaaacatatatgcttttcgttatatcaaaggtgcttggtctttgaataatactgcaaataaaacattgcgtacaagttatcaaaataatcgccttgtagttgaaattgatcaaagtaataagtttcaaataacaccttatgttgattttattcaatatgaatctagcgtttttattgctgatttaactcagtttgaaactgctatgaattatcatgagcgattgaaagagaaaaaagcagaaacaatttctgcattgggtaaaagttttgcgatgaatgctgatgaatctaacaaacttatatctattattggcgatgataagcgtttaatgcgtcaattagcatctgtctatgaaaagcaacatttcaataatgagctctggttacgtaaattacgtgatgcggctgatgaagcaggtaattggcaaattaagtttgatgatgatggtaagattaaagttatagaaaagaaggaatatgtaaaagagttattagttcttcttcagaataagcgtgttaaaacggtagttgacggtctaatgttcgatgtagaaggtgagttagtaactattcaaccgatacaaccctaa

SEQ ID NO: 96432 - DNA, 600 bp, Clostridium sordellii
ttgaaaaagtctgttaaatggctcttatttatttcttcttatattcctctgtttataatattgatatttactaatatagactttaaatcaacttataattttattcaatatatattaacaaatagatgtgaatttattttaaaaaatataaaatttcaggatatttacctttggatattgataattttatgtattacttgtttagttctagtcaaaatagtaattatacaatctagaggttttgaagataataaaaaaattatagatatagagccaaataataattcaatattagagtattttgttacatatttattgacattatcttcttcgggtttttcttttaaagaggtttttatattttggttcatattatatataataggtcatttgtatataaaaaataatcagtttcatattaatccaactttatgcttactatttaaatacaatatatacaaagttaaaactgaaaattcaaaagaatgtttcatactatctaagttaaatgaatatgaatttaatagttatttaaattcaaatattcaagtaactctcttatctgaagggttcaaaggaaatatatatttatataaataa

SEQ ID NO: 96433 - DNA, 1008 bp, Clostridium sordellii
ttggaaaatactttaaatatagaggatataaaaggtcgtataaaaagtattcatttattacttttaaaaaagaatactaatttttctaatggcttagaacctttaaaggcttatataaaaaatgatatatttgatgatataaaaaagatatatataaaacctttggaatcaatttttagtaattgtgagttagaaaattttagttatgattctagtttagatggagctattccttttttatcaacttcagaacttactcatagctctgtattttcttcattattaaacagtatttcatcgatagattctattaagtcattgaaaacatttgaaaatacattatctgaatcttatctatatgcatttatatttacattagatgatagcaaaacttttacagtcgttagaaaaatatatgctttgaactatcttaaaaataaaggattattaacctttaaagactctagattaaactttatacaagatgacttatttgctcttgatcctaaaattgattgtataatttatgataactctgtttatgttacaggtaagcataattttgagactatgttttcatataattatcactatacaactaaagctactattacactagactcaataaaatcatcaaatattttaagtaatttcgacgaatttaaattagattgtctagacagatctacaattactagaaaactggctgagttatgtgtgcatggagatattaatatatttatagataaacttaagaataattctaagagtatagaaaagacaatagaaaaatataatttggacatctcattaaaagataacaaaatagtttactctgatgtgtcctcactgtctgaaattataaatttaatatcagataactactttaaaggagatataaccaatgacatatacttggctagaggaaaaagtcgtttaagttcaggcaaaagtaatcctaaaaaaagaactactacaaaaaaaagaaaatccagaaaaagtaattaa

SEQ ID NO: 96434 - DNA, 531 bp, Defluviitoga tunisiensis
atgcttagtaaaatttcaagggttcttctgtttttgttgtcttaccttcctttgtttttgatatatgcaattaatggtgtgattcatggcgagtttgttgtattttgttcttttttgtttgttattttagttgttagtgttttatgttttttgatgtttaggtcgcttaaaaaaagaggcaaaaagcggtctttgattgttgaaagtaatgagctagttaataatatgcttattgagtatatttttgtgtatattttcccgtttattagcgcttttgataagagagagattgtttcttttttgattctgtttgttataattggtagtatttatattaaaagtgatttgatagcggttaatccaacgctttctcttttgggttatagtatttacaaggttagttatcgatacgaggatgatgtgtcgcgtgttagagaggggtatttgatttcaaggggtttggatgatgctggggtgaaggttgagatgagtaagggagtttttatccattttagaagtaaaaagaagtga

SEQ ID NO: 96435 - DNA, 936 bp, Defluviitoga tunisiensis
ttgaatgagatttgccaaattttggagaataatacggtttctcaaccagttgaaatatgtttgcacaaggatggtaagttgtttgatttaacgtgtgatgatgcctcgttttttgaggagattattgttaattctgttagagagtttgtgaaagaacttgagagcgatgatttggttgaggttcaaagttatgaggattcgatttatgataagcgctttttatacctcgaaaagcaagaggtgccccaggtagttgatattgagagtaggttgttgtctggtacttcgctttatagattagataagtctgtttttaaggattataagaattttgatattattgttaagtatttttacagggagattggggccaatattattggttttcaggagctagattcgaggcatatttttgatgtgaagagattgttttttttagatagtgctaatttgaaatctcgggacagggggattattttaaagcctaaggagttttttgattattttgttgttggagatattttgtttattaggtctgtttattattttgagaataagtttcagttttttaagaagtatgttacttcaaaggatgagtttgttaaggagataaaggtgaataataatgttcttgggagagatattaggcttaaggggattgattattttgataagtatgtttctgagaggaagacttttttgaaaaaacttcacgggatttataaaaaggggaattatgtgaattttgagtttgaaaagttaaaagaggttataactaattttaatttgaagataaatctagttgaaagtaacaacgagattgtattggatgagaagacttctattaaggactttttggatttgttgagtgaattgtattatgtttctttgttgtctgaggataggttgaaggcgaatgaatctgtgaggctttaa

SEQ ID NO: 96436 - DNA, 333 bp, Ralstonia mannitolilytica
atgttcggctacaccatcccctacatgctttcgttcatgaaggtggacctgggagactggcaggtcattgtgagcctcgccctttttctagccattcttttcatcatggcctaccgcacccagacggttttcgtgaacccgattctcgctcttgcgggttacatgctgatcgattgcaccttcaaacgcggtgacaaggaaattcaggcgatggtcgtgacacggcaaccgctggccgtgggtgacacttgccgcatggagcggatgtcgcactatctgtatgtggccgtcaaagacaacgccaatctggataaaaagggcacagaaaaatga

SEQ ID NO: 96437 - DNA, 939 bp, Ralstonia mannitolilytica; identical to SEQ ID NO: 95991

SEQ ID NO: 96438 - DNA, 594 bp, Enterobacter sp. 44593
atggatagcaggccatatcttaaaacagtactatatatactatcactatggcttctatttttatcattattaattatgtcctacgataaggttttgataaaaaatgtgtgggactatatttttactgaaaactttaccttctcaatctcgtcattgaaagtgagaaatatcgttttcatagttagtttgattttcatttttattggtgcaattattttaatagtccttgcaaatagctttggttcgggttggtctgttgcatgcactgtctcggatattagcaatgaaaaccatgaacatttagagtttttaaccacttatataatgcccttagttttcactgatgtcgatagtaagagaactgtattaaatttagggttgatgatatttgtaatcggcgcaatatacgtaaagacgaaccggttttattctaacccatcacttgcaatactcggattcagaatatacaaagctaatgttcatgaccgtggagtgaaaaaatgcacagtaatctgccgcagtgttctaaagagtacagataatataaagtatataaaaatcgacgatgaaacttatttggctaaaatagtgtag

SEQ ID NO: 96439 - DNA, 972 bp, Enterobacter sp. 44593
atgttcactaacattgaaaatattttaaaatcgaaacacatctctggtgaagctttttttgttgctgatattcaaggtacgatagatatatttaaggttaaccttgaacctgatgctgaaaaagatctgaccacttcattttctaaaagcttaatcaataatattattgaacctaacagaggtaaagtggccgttccacttgtatccactttattagaaagagataagcaagttttcgaatatgatcacttagcaattaatcacctcccaattgaatttactaaaatgaacaacgtgctaaatttcggtgtcaatgggaatgcaacacagtttgattttgcaacacaaagcctcacatcggtaaaagccgtaatttaccacctttgtgatggtaatggaaacagcgtagtcatttaccaacataaatatcctgtttctctacataagaaaacaaaaaaatctttcttgagtctaaatggcagaaccttagataagatcactcatgacagtattgatataaatgacactattgacttcttcttttttcagaataagtactatgcgctaaacattaagcttcttgaaagaatgtatggattagaaagtgtaatagataatcttgcaaataactcaacgccattaataataaaccttggaattgttaatacacaaggtatgccagtgccactagatattttcaaggatatgtataaagacagagcatttatgcgtagacttgctatggtttcaaaagggaacttagtaaaaacgggagtttcagtccctcaaatacaacaagttatgcaaaaattccctgtatttcaacggaatattgatctaacaggaggattaataaaccttaatactaaagatcaaaagagatattttatccgacttctaaataatgaagcatcttttgcagcacttgataactcgcccttcctggctgttgaaaaagactccgctgcataa

SEQ ID NO: 96440 - DNA, 600 bp, Enterobacter cloacae; identical to SEQ ID NO: 96132

SEQ ID NO: 96441 - DNA, 960 bp, Enterobacter cloacae; identical to SEQ ID NO: 95809

SEQ ID NO: 96442 - DNA, 612 bp, Listeria monocytogenes; identical to SEQ ID NO: 96206

SEQ ID NO: 96443 - DNA, 942 bp, Listeria monocytogenes; identical to SEQ ID NO: 96207

SEQ ID NO: 96444 - DNA, 510 bp, Vibrio parahaemolyticus
atgcggaactcgctaaagacaatttttttcttgtcctcattttcaccaacactactagcactcgctatagttagatacttcatttctggggatgacctgctattttataaattaatatctgtttttgtgctgggtttagtgctgttttgtttgatatttcagttggtaatgactcagggagagaaaattagttttaaagctaaaaaagtggagtcgaccgactattttcttttggtttttctagccgcatatacggcgcctatagttatgaggatggtcgaattaaattttagagtaatttccattattttaggtctgttaatggttacgctatggattttgccatatataccatctcatcccttaatgtatttgttgaagtataggttttataaagttgagtctgatagtggtgttgtttacacattgatatcaaagagaaatatacgtgacccaaagtcaatcaaacaagttatcgcaatctcagatagtatgcttatggagaagtaa

SEQ ID NO: 96445 - DNA, 501 bp, Vibrio parahaemolyticus
attttccattcgtcaaatgtttacaaaaaaattgaaggtatcggtttaacagttgactcaaaattaactgctattctcgaaggtggacggttacgtttccataatttctttatggctcgccaaatgttcgacttaagcgagtattacaaagaggctactaatgaggacattgcagttttctcttcgagtgacgtcgttcaagtagttgagaaagaaaaattaatcgaaatatcagacagctgggttagaagaaagatttcacttatacaacaaagtgatattttgggtactgttcctatacatgttatgaaggctgtcgcttctgagttcaatattccgttttctactgtaaatgttaatggtaatgaggttattcaaatcccaactgaaaagccagcattgaaagtgctactgagatttttagacgaagattattacaaatcacctttatcaaatacgagttttgtcactaactctaagcgtgaatgtaattttagttaa

SEQ ID NO: 96446 - DNA, 588 bp, Vibrio parahaemolyticus; identical to SEQ ID NO: 96174

SEQ ID NO: 96447 - DNA, 987 bp, Vibrio parahaemolyticus; identical to SEQ ID NO: 96175

SEQ ID NO: 96448 - DNA, 585 bp, Xanthomonas citri subsp. citri; identical to SEQ ID NO: 95814

SEQ ID NO: 96449 - DNA, 930 bp, Xanthomonas citri subsp. citri; identical to SEQ ID NO: 95555

SEQ ID NO: 96450 - DNA, 585 bp, Xanthomonas citri subsp. citri UI6; identical to SEQ ID NO: 95814

SEQ ID NO: 96451 - DNA, 930 bp, Xanthomonas citri subsp. citri UI6; identical to SEQ ID NO: 95555

SEQ ID NO: 96452 - DNA, 585 bp, Xanthomonas citri subsp. citri; identical to SEQ ID NO: 95814

SEQ ID NO: 96453 - DNA, 930 bp, Xanthomonas citri subsp. citri; identical to SEQ ID NO: 95555

SEQ ID NO: 96454 - DNA, 585 bp, Xanthomonas citri subsp. citri; identical to SEQ ID NO: 95814

SEQ ID NO: 96455 - DNA, 930 bp, Xanthomonas citri subsp. citri; identical to SEQ ID NO: 95555

SEQ ID NO: 96456 - DNA, 585 bp, Xanthomonas citri subsp. citri; identical to SEQ ID NO: 95814

SEQ ID NO: 96457 - DNA, 930 bp, Xanthomonas citri subsp. citri; identical to SEQ ID NO: 95555

SEQ ID NO: 96458 - DNA, 585 bp, Xanthomonas citri subsp. citri; identical to SEQ ID NO: 95814

SEQ ID NO: 96459 - DNA, 930 bp, Xanthomonas citri subsp. citri; identical to SEQ ID NO: 95555

SEQ ID NO: 96460 - DNA, 585 bp, Xanthomonas citri subsp. citri; identical to SEQ ID NO: 95814

SEQ ID NO: 96461 - DNA, 930 bp, Xanthomonas citri subsp. citri; identical to SEQ ID NO: 95555

SEQ ID NO: 96462 - DNA, 585 bp, Xanthomonas citri subsp. citri; identical to SEQ ID NO: 95814

SEQ ID NO: 96463 - DNA, 930 bp, Xanthomonas citri subsp. citri; identical to SEQ ID NO: 95555

SEQ ID NO: 96464 - DNA, 585 bp, Xanthomonas citri subsp. citri; identical to SEQ ID NO: 95814

SEQ ID NO: 96465 - DNA, 930 bp, Xanthomonas citri subsp. citri; identical to SEQ ID NO: 95555

SEQ ID NO: 96466 - DNA, 585 bp, Xanthomonas citri subsp. citri; identical to SEQ ID NO: 95814

SEQ ID NO: 96467 - DNA, 930 bp, Xanthomonas citri subsp. citri; identical to SEQ ID NO: 95555

SEQ ID NO: 96468 - DNA, 585 bp, Xanthomonas citri subsp. citri; identical to SEQ ID NO: 95814

SEQ ID NO: 96469 - DNA, 930 bp, Xanthomonas citri subsp. citri; identical to SEQ ID NO: 95555

SEQ ID NO: 96470 - DNA, 585 bp, Xanthomonas citri subsp. citri; identical to SEQ ID NO: 95814

SEQ ID NO: 96471 - DNA, 930 bp, Xanthomonas citri subsp. citri; identical to SEQ ID NO: 95555

SEQ ID NO: 96472 - DNA, 585 bp, Xanthomonas citri subsp. citri; identical to SEQ ID NO: 95814

SEQ ID NO: 96473 - DNA, 930 bp, Xanthomonas citri subsp. citri; identical to SEQ ID NO: 95555

SEQ ID NO: 96474 - DNA, 585 bp, Xanthomonas citri subsp. citri; identical to SEQ ID NO: 95814

SEQ ID NO: 96475 - DNA, 930 bp, Xanthomonas citri subsp. citri; identical to SEQ ID NO: 95555

SEQ ID NO: 96476 - DNA, 594 bp, Klebsiella michiganensis
atggatagcaggccatatcttaaaacagtactatatatactatcactatggcttctatttttatcattattaattatgtcctacgataaggttttgataaaaaatgtgtgggactatatttttactgaaaactttactttctcaatctcgtcattgaaagtgagaaatatcgttttcatagttagtttgattttcatctttattggtgcaattattttaatagtccttgcaaatagctttggttcgggttggtctgttgcatgcactgtctcggatatcagcaatgaaaaccataaacatttagagtttttaaccacttatataatgcccttagttttcactgatgtcgatagtaagagaactgtattaaatttaggattgatgatatttttaatcggcgcaatatacgtaaagacaaaccggttttattctaacccatcacttgcaatactcggattcagaatatacaaagctaatgtccatgaccgtggagtgaaaaaatgcacagtaatctgccgcagtgttctaaagagcacagataatataaagtatataaaaatcgacaatgaaacttatttggctaaaatagtgtag

SEQ ID NO: 96477 - DNA, 972 bp, Klebsiella michiganensis
atgttcactaacattgaaaatatttcaaaatcgaaacgcatctctggcgaagctttttttgtcactgatattcaaggtacgatagatatatttaaggttaaccttgaacctgatgctgaaaaagatctgaccacttcattttctaaaagcttaatcaataatattattgaacctaacagaggtaaagtggccgttccacttgtatccactttattagaaagagataaacaagttttcgaatatgatcacttagcaattaatcatctcccaattgaatttactaaaatgaacaacgtgctaaatttcggtgtcaatgggaatgcaacacagtttgattttgcaacacaaagcctgacatcggtaaaagccgtaatttaccacctttgtgatggtaatggaaacagcgtagtcatttaccaacataaatatcctgtttctctacataagaaaacaaaaaagtctttcttgagtctaaatggcagaaccttagataagatcactcatgacagtattgatataaatgacacgattgacttcttcttttttcagaataagtactatgcgctaaacattaaacttcttgaaagaatgtatggattagaaagtgtaatagataatcttgcaaataactcaacgccattaataataaaccttggaattgttaatacacaaggtatgccagtgccactagatattttcaaggacatgtataaagacagagcatttatgcgtagacttgctatggtttcaaaagggaatttagtaaaaacgggagtttcagtccctcaaatacaacaagttatgcaaaaattccctgtatttcaacggaatattgatctaacaggaggattaataaaccttaatactaaagatcaaaagagatactttattcggcttctaaataatgaagcatcttttgcagcacttgataactcgcccttcctggctgttgaaaaagactccgctgcttaa

SEQ ID NO: 96478 - DNA, 489 bp, Acetobacter cibinongensis 4H-1
atgctctcgctgactgctgtatgcccagtatttatatcgcttgcctatatcgaatttaaaaatggaaaacatacatactgttatttcttcttatttttattttttgttgtggttttttttgcgaaatgcgtaataaaaaaatcaaaagaaaaacttgaaaaaataccaataactataacaaaagcaaaaacaacagataaagaagttataagtttctgtatttcatatgcactacctataatttttagagcaaattcagtttcaaatattgaaacttggctggttgcctccttgattttatttgttgttctctggaccactgatgcaatgcccgctaatcccgttctaggcattcttggctatcatttttacgaagtcgactcaggaagtggcgtagggtatgttttaattacaaaaaagcgaatctctaatgtccagcaaatcaatcaggttgtacaaatcggcgaatacggaattctagaactataa

SEQ ID NO: 96479 - DNA, 861 bp, Acetobacter cibinongensis 4H-1
atgaatctctttgcaattactcatgcttcatccgataacattttaagacttccattgagtgcagatcttcaaacaaatttagagactgaatttaatcgccaagaggccgatttttttaatcgaattgaagagttattacctttttgcggcgcatggaaagctgaagcagatgaagcattcactatagatcagttttctacactttacgatctacctaaagccattaaacaaccaatgagctttcctctctacgacaaaaatctacataacctttcagaaataaaagccattttttgtggcagctcaacaaaaaataaccgcatattaatacagaaatttaataagaaaaatgttatagaaacaaagaagtacatgttctttttttctggagatacatttgttaaatcaaatgacgatgctattactattgacgacaatatttgcgctgctattgagccagattcctctctagtgtttcggagttatcactctgtaaggcaagtctttgatatgtcagaatattttgtagaagcaactaacgaccaaatggccgaatttgctaatatccaagctttttctattgctgatcaggcaaaatttctcgctatagacaatcagtttattagaaaaaaaataaccgaaatcttaaaatctggacatttagggactttgaatgttcaaaatatatgcgccgatgcaaaaaaatataaagtagaaataaatatagatgataaaggaaaaatattaattcctgaagacaagcagaaattgagggttttacttaaatttttaaatgaagatttctttgaatcgattattaaaaaagatctttacttatcaaactctaagcggccaatctaa

SEQ ID NO: 96480 - DNA, 531 bp, Gluconobacter thailandicus F149-1 = NBRC 100600
atgtttggaaggctcgccaaatttctgctgattgcgtcggccttagcgcccgtagggctcgtgtacgcgtggatagtctggcgtaaccagcaacacgccattgcgattggtattgtcgctgcctgcgcgatgctggtattgatctgcgtgtacctgcttcggcaggcccgtacctctttggaacgtttcccgctcaatattaccagtgttgagccagccgatcgcgagaatatcgcgttcatgcttctctatctctctccgctatttacttccgaacttgggcagatcaacatcaatctgctcataccaacactgttgatattcacacttttgacggcaacaggatataactatcatttcaatccactgctcggcctagccggctggcatttttacaaagtcgagtcttcagaaggcgtgacctacgtcctcataacacgcaagcagctcaggaatacgagcacaatcaatcacgtcggccagttaaccgaatacattttgatcgatctagaggatgcgaatgcctgttaa

SEQ ID NO: 96481 - DNA, 879 bp, Gluconobacter thailandicus F149-1 = NBRC 100600
atgcctgttaatctgttggccatttgtcgctcggcccccgccttgatcgtgaagcgcatcaaagtaactgctgcggttcagaatcagctagaaggaatttttatccagcaggagcagatgtttgttggtggcgtaactgatgaggtaccgtttgatggtggatggagccccgacccacacgagcatcttgtggcccaagtgacggatgaagcagccgccatttttgcagctgctcagggtaacatcgtagcaatgccagaagtcgatccagcgaacttcgaggctgagaacatcagagcgctgggtgtcttagtgcaacgcccatctggaccacgcctgctgttacaagagttttctgcgcgccagatgcttgagcgtcggtttagtctaatacttgatggcaacaccttcaatcgactggttcagcccgcatttgcgattggagcctctctagcgggcttcgtagaagatgacaaaatcaagttccagaaattcagccgtatcaagctgatttttaacctaaccagcctttatcaggaagcgactgatactgaggttgaaggcttctgtggtcttgaatgcatcagtgtcggcgacatcggaaaattcaaaaacctcgctgatcaaaagatgcgaaagctgatcaatgcgatcactaagcgaggtacgctaaataattttacacctgctcagattcaggtcgcagcggccgatgagaactttcaaattgcggtcgcagacgggaagatcatcattccgtcaatgaaagcagaagcgaaggcgctccttcatttccttgacaatggcttatatcgtggcccgcttggcggagaaatttttattactaattcaaagcgggcgctcacacccacgccctag

SEQ ID NO: 96482 - DNA, 555 bp, Bacteroides fragilis
atgtttgccaatcatataaaactaatttttgtattaacagcctattctcctataatatttattgtatgggcagttgaagtatataataacttaaccaaagggaatcagattggactcattaataagcctatagagattttcaaccgattaaatctaatattcattttcattatactcttattagcatgttatttattcatgaaagcagcgagagggaaattaactattaataacataggtgtaaaatctattaagagcgcagatttgaatatgaactctttgttgttaagctattttttaccatgtattgaactctttaaaaaagatccaatttttatttttggatggtttgttgtgttaatcatattgatagttataaatagaggtacatatttttacaacccaattataaaactctttggctatagatattatgaagtcacaacaaacagtggcgttgtctacactatgatttcaaaaaagaaattagtgaacaccaatgaagtgaaaagatattcacagctaacagattatgtaattttaaatcaattataa

SEQ ID NO: 96483 - DNA, 849 bp, Bacteroides fragilis
atgagaacacaagctaattctgccgtatgcaacttctttgcccttttaaaagatgacactgtaagaaaaatagatttactacaggcaattacaaataacataaaatcctgttttattgacaattcaacaaaactaatggatagtgaaactgaagaaattttatttgatgggaattttaatatagatgggaacgaggtattatatgttgaatttcctctttctgatacattattagaagcgaacactaatagtatcggtttaaacaccttggatatatcaacagatgagatcaaatcactattctggattgaaaataacatatattattttcagaactttgacaaaaggaaactgttacaaaataaaaatgtacttttttggaataactccacctatgataaactgtcaaatgatgctcttatagttgaaaatacagtaaatgccatatataaaaatggtaaattctattttaaatcatatactaatgcaaacaaaataatttcattgatagatttctttgaagaagcgtcaaacgaaaccattgaagactttgctaatcaagaattattaaatgtgaacgtagattggttgaaagaaaatagtaattctatgattagaaaacaaataacacttatccaaaagagtaacattttggctacagcgacagtcaaaaagcttaaatcttctgcaaagaaattcaatttgcaaatagaaattgccgatggtaaactcaatatacccaatgataaaaagcaatgcaaggatgtactatgtttcttaaatgagcaattttatattgggctaatatcaggaaagaaattccgaactaactctaagagggaagcttag

SEQ ID NO: 96484 - DNA, 513 bp, Klebsiella pneumoniae
atgaataggctagcacgtctattacttacagcaagctcgattgcgccagtgtgcgcaacacttttttttataggttttgtaaaagagacagtgtggcttatgaactacagcctatacgtagggttagctagttggtgtttagctataggcttggtaaaatacgccgattgcaagatggaacggcttacaaaaaacatcaattctttatcaccagctaataaagaggtaactaattattttttaagttatcttttccctttgttaggtacagattctatttctgaaaataaatcctatgctttatttttctatttctctttgctattttatatatgtttttccgaaaactacaatttcaacccagtcctgtcactgcatggatataaattttacgaggcagaagatgatactggggttgggttcgtattgatttcaaaatccgttattacggatataaaaaatattagttttaatgttgttcaactaacagattacacatatctacatgtataa

SEQ ID NO: 96485 - DNA, 885 bp, Klebsiella pneumoniae
atggccctttttgctttgatggataagtctatcgcaaccagagttgttagggtagagttagacttgggtgctagcacttctgtgtcgacgatctttcagcaacagcgattacatttccaaactcatcacaataatcacgtagctttttacgcaggatatgaacctagatatgatgaatgctttgagatacaaaatttcgcagatgctgctttattaatagatgctgcaactagacctactgccatgcccgtctgggatccaagccaaataagcatagataatatcaaggctttattcgttggcgttgatgccccaggaaatccaaacataattgcgttgcaaacctttaacaaaaaacagatccttgacacatcaaaatcatttcttgctactatgattggtagaagcacaacctttagcaaagctgttgatgtaggatttaatctcgatgacaagctagttgcaattattgataataataccatttgttttaagagcttttttaaattaaggagtgtatttgacatgacgtcatattttacagctgccacagatcaagatttagatgcatttagtcaattgccaatattctctattgctcaagggtttgatattaaaaacgtagcagacacggtcattagaaataaaataactctgataaatcaaactggtctactgacacctcaaaacctcgcacttttcaaggcagaggcagtaaaggtcggcttccccttacaaaccgtagtagtgggtggtgtagaaaaaataaccatgccttcttctaaaaaagaaattaaatccctcctagacttcatcgaagaagatatttgggtttcaggaattagtggaagacgctttaaatcaagttcaaaacgcccaatatga

SEQ ID NO: 96486 - DNA, 624 bp, Vibrio cholerae
atgagaatcaacaaattacatttaggagctagaatatctttattcatcgtatcctacttgcctctatttttcattatgtgctttgttcaactctactcttacaaaaattttttgaattggggtggtattagttacaattctttatctgtattttttaaatattttggtgctgttactttattaattttaatttcattatttggtatttttggtcttgttgtatttttaaataaaatcaaaagcagatgcagaacaagtggcagggtagttaaaattgtagatatagaaaataaaaatagtgaatctattagttatttgtttacctatattattccatttgtattccaagacttatccacattaactaatgttgtcccgatagcgatactattaacagtgacagcgttaatttatataaactccagcatgatactgatcaatccaaccatcagtattaaatacactttatatcaagtcacatatgttgacatagaaagtgggaaaactaggagtggcatgtttttgaccaaatcaaaatatcttgaagaggatgatttattggatattgaagatgttggacctaaacttttttacgctgaaacacacgaggaatataaatgttaa

SEQ ID NO: 96487 - DNA, 1023 bp, Vibrio cholerae
atgttaaaactggaagaactactagaatatgcggagaatttaaaagaggataaaaaagccaaaatatccttatactttgttacgagacatctaaaggtcggtatagataaaaacgataagcttactgacaagtacgattttaaagtaattcaagctccaatagctcaagatattgctgatttttttaaagctacattatcgaaccaaattacatctcacgcatctaaagatgatattgtgatgaaaaactacactgtcattgatgatgatattgataataaaatatatgcctacgcgatgaacaatgcgatatcattctcaaaagtcattaacgaaggcattaaaaatgacaagcctaaaaccctaatttctttaaatgaagttaaaagtgatttgtgggcgtattgcatcaaagtacagcaaggaacatctttcacttattcatttagaaaaataagcggaggaaaaatcactactaacgaccctcagaatactcttcaaaaagtatttgctctatttgacaaaactggtggtactttaactgcatttgatggcaatgcaataaattttgatgacaaaatagactgtatttatatccaagataaattttatgtattccacaagaagagttttgaatctatcgttggacttgaaactgagttcacagaagcagcacaaaagacactagatacaattaaaaactttgaccttgtggaaggattagacattattgaaaaagcgatactgcataaaccttctctaaggaaaactctagcgcatattgctgaaaaaggtaatcacacaaacttggacaaaaatgaagtcaaatcgatgaacgatgttctagaaatgttccaaggtgagaaattcactatcaatgatgctggtaaaatcgtcattgaagatgaaaaacaaggacgaaatttcctcaagcttcttaacgattattacaagcaaggtatgactacgaaaaaatactatggtagtgatgctggcaatttagttactcctgttaaatcttag

SEQ ID NO: 96488 - DNA, 675 bp, Methanosarcina sp. WWM596
atgagcgcccttaaaaccaagtataaaatattgatgtttctcagttcttacacacccttatttttaattttgttattgaaagcaatatcacatattttagaaaaggttcaggattacgctaatctaaaaattccagaagctgtttcggagaacataacatttattgaacaagtccaaattattgctcaacacaaaacagaatttatttctttaaacataattccattggttgtgattgtcacaatcatttttataattatagttccgaatttggttttagaatctatattaagggaaacaaaatgttcaattgatttcaaagatctatatgttcaatcagttcaaaaaatgaatcacatttatatggaatatcttgtttcttacataattccttttctttcttttgacttctctaattttttcgatatgatttcactgctaatattattgttcactatttgtataatttacataaactcagatttactatatgtaaatattaattttagtattcgagggtataacttattcaaagtttacactaaaaaacaaaatgaatatatggttctttcaaaagagaaacagttatatccagataaaatattgaaagtggtttatataagtggatcttcggaaaggattgcattagatattgagcaggagcaaacagaatga

SEQ ID NO: 96489 - DNA, 1044 bp, Methanosarcina sp. WWM596
atgacagactacgcctcttatcttcaggatttacttcgtgttgcaaagcaagggcataatgttcaaatgcacttattgaaaaaaacaaccagtgaaaaagaagaaaagaaaaggcagatacttaatgttgaagtagatggtgaggttttaacttcatttaaggaaaatcttatcgaaaaatgcaatgagctgatgagtgatagcgaattaacttatattgactttttttcagaagatcccgaagacaatgtcatatcaataataaatcaagaagatatgaaatcagttggaacattaaatccaataatttcacaaataaaaagtgaagatgattcaagaagtgtaactgaatttaatgatcatacaataaataagttacaaagttatgcaatatctatggccttcagtgatgatagtggggaaaacaaaatcgaagagacatgcatatatttcaggaagtatcaagttggctcgaagattgcaaaatcaaagttttttaaagtatttgaacataagcaaggaaaattcaataaaatagaaggtgatgtattcaaatatgacgacgttatcgatgcaatgtattatgaacgtgtagatttagataaccctgatcaaaatggttcaaaaattatgtttgtaaggaacataagtaactttgaagacatgttttcatttgaagaattttataaatcaaatgcgaaagcagcttataccattctcaaatcttgcggtaatgttgaaattgaagaagctttatttaaagagatcacaaatgataaaagaaatttaaagagaatttgtaaactgaataaaggaaatttttttaaagagattgattttgatcgattcttcttaatatacaatgccgcttcttcattagattatgctttaaatgttgaatctgatggagaaaaaattaaaattaaaagtaaggaatctttttttgaatttatagatatttgtggaaataaattatatggagatttggtagacaaaaaaatctataagggaattgctaaagaactgcccaagaaatcagcttaa

SEQ ID NO: 96490 - DNA, 675 bp, Methanosarcina siciliae HI350
atgagcgctcttaaaaccaagtataaaatattgatgtttctaagttcttatacacccttatttttaatattgttattgaaagcaatatcacagattttagagaaggttcaagattacgctaatctaaaaattccagaagctgtttcagagaacatgacatttgttgaacaagtccaaattgttgctcaacacaaaacagaatttatttctttaaacataattccattggttgtaattgtcacaataattttagtaattatagttccgaatttgattttagaatctatattaagagaaacaaaatgttcaattgatttcaaagatttgtatgttcaatcagttcaaaaaatgaatcacatttatatggaatatctcgtttcttacataattccttttctttcttttaactactccaatttttttgacatggtttcactgctaatattattgttcactatttgtataatttacataaactcagatttactatatgtaaatattaattttagtattcgaggatataacttattcaaagtttacacgaaaaaacaaaatgaatatatggttctttcaaaagagaaacagttatatccagataaaatattgaaagtagtttatataagtgggtcttcggaaaggattgcattagatactgagcaggagcaaacagaatga

SEQ ID NO: 96491 - DNA, 1041 bp, Methanosarcina siciliae HI350
atgatagactacgcctcttatcttcaggatttacttcgtgttgcaaagcaaggacataatgttcaaatgcacttattgaaaaaaacaaccagtgaaaaagaagaaaagaaaaggcaaatacttaatgttgaagtagatggtgaggttttaatttcatttaaggaaaaccttatccaaaaatgcaatgagctgataagtgataatgaattaacttatattgactttttttcagaagaacccgaagacaatgtcatatcagtaataaatcaagaagatatgaaatcagttggaacattaaatccaataatctcagaaataaaaaatgaagatgattcaagaagtgtaactgaatttaataataacacaatacaaaatttgcaaagttatgcaatatctatgtcttccgtagataatagtggggaaaacatagaagaaacatgcatatattttagaaagtatcaagttggctctaagattgcaaaatcaaagttttttaaagtattcgaatataagcaaggaaaattcaataaaatagaaggtgatgtattcaaatatgacgatgttatcgatgcaatatattatgaacgtgtagatttagatagccctgatcaaaatggttcaaaaattatgtttgtaagtaatataagtaactttgaagacatgttttcatttgaagaattctataaatcaaatgcgaaagcagcttataccattctccaatcttgtggtaatgttgaaattgaagaagctttatttaaagagatcacaagtgataaaagaaatttaaagaaaatttgtaaactaaacaaaggaaatttttttacagatattgattttaatcgatttttcttaatatataataccgcttcttcattagattatgttttaaatgttgaatctgatggagaaaaaattaaaattaaaaataaggagtctttttttgaatttatagatatttgtggaaataaattatacggagatttggtggacgacaaaatctataggggaattgctaaagaattgcccaagaaatcagcttaa

SEQ ID NO: 96492 - DNA, 591 bp, Lactobacillus melliventris
atgaaaaaattgcaaaaagttatgggaatttgtctaaagatatttttatttttatcttcatatatacctttatttattatggtttttttgaactcaatgaatcaaatttcaataatatcaattgtcaaaacatggaatttgaatccgactctctggataatttttttggttataagctttctctctattgtaatatttatttcctggctatgtagaatgaaaaaaacatttaagggcaaaagcccaatatctataaaaaacttaactttgaatgattcagcagttttaaatttttttgttacatttattgtgccaatcatttccttaaagcctgaatcttggccatctgtgatttcaaatttaattttattaatcatagaagggatcttttttattagcaataacactctttatttcaatatattactaatattctgtggatatcatatttatagctttgtttctgacaataacagaaaaaatatcgttataacaaaatgtagtttaaaagaccaaacctttaatgatgtaaaaggcgtagagtatggtacaactaatatatattatgctgaaaaaataaaacataaataa

SEQ ID NO: 96493 - DNA, 942 bp, Lactobacillus melliventris
atgaacttagatgaaataaaaaaattgttaaacaatgatttaattgaagttgacatgtatatgtgtcattggtcaacagataaaaagaataatctgaaagagttaaaagtaataaatccgactataaaagataagctgaaaaaacaattaaagcatattgtagaatttaatatagataagtttaaagattatgataatacggagtacaatatcattggatgcgatgacgataaaattgaaagtacgagtgtaaccaggtatcaaaaccaaattaatctaatttttaaggcgctaaaaggtccatttgaaagcgatgatgatattaaaatagatgattttgatttttttgtttataagttttcttttaaagataatgatgataaacatgacttttatgctgttagacgtacgaaaaagtttaaagcattaaagactggaatttggggaatgctagaaggtggagtatatagttcgcttgatacagaaaatgttttaggaaccgatagctgggtggacttttttatatataaagatgatattttgattttacaacatatatcatttgaaagaattcttaaattaaaaaacgagtttaaagaagccgctgaacgggtattgagttcagaattattacaccagaaaatcaaaaattttgatcaacttaaaattgatgcattaaataatcagaactatataaaaagactttctaaattggaaggaactagtagaataaatttatttttaactaaattagatagaaccaaagatgctatagataaacttggattagatattgaagtagacactatagctgacaagcttgtttacaataataattctcagttaggagaatttattaatcttatgcaagatgcatattataaaacgctaattggcgaagagaacggagttgatgaacgtaaaaatttaatttctaaataa

SEQ ID NO: 96494 - DNA, 657 bp, Bacillus sp. UMTAT18
atgagaaacaaattatctaattttatgggcggattagtaaaagtaattttatttgcatcctcttatatacctttgtatgtcatcatgatcttccaattatgggagtcttcaaaagaaaaaataaaaaatacttttcatttttcatttttcaaaattactacatggaactcaatattagaattggaagatattaaaaaaatagccttccttactatcttaacaactgttcttgtaataatcctagcatacctgttgtttacaccaacagacccaaatacaacaaaaaatttatcaattcgtgaggttgatagtattaatgtaaattatataaccagttacttttcggtttatatatttccttttataaccttgaatttcaccacatttaatggtatggcaactatgattatccttgtttcattaattggatatgtatacattaaaaatgatttagtatatattaatcctattctccacctactctttagatataatatttatgaagtagacattatagaaaataacgagacaaaaaaagttacaattttaagtaagaaaagtaggttaaaattaaaaacatcgactaacctgaaattcaataaattaagcaccaatatttggatcgaatctcatactttaaaaaaagtaaaaaggtaa

SEQ ID NO: 96495 - DNA, 918 bp, Bacillus sp. UMTAT18
atggaaggcattatccgaagactaattgaagcaagagaaaccatggaaagattagaaatacactatattactaaaagtagaaatactgcattaacaaatcaatatacaaaatttgagatttccgtaccgatgaatgtcgcaaatgaaattaaagacttagtctttggtaatctagtagaaaaattaacagggctggaattaagagaacacgatcctgttatttctgaagctaacactttagaacacctaccattatatgaagttgataactttgaaaatatagtgtcagcgccggaagaacaggtatccgaattagattttggaaatatatggggatatacgataaaggtttattttgggcaagcgaatcatgatatagtattcttcaaaaaattcgcttatcctagactattaaaaaaaagtattaagcttcgattaagaaatgatatttttgatgtaattgaaagtgaagtagtcaccatagatgatgtaattcattctttttcacttgacggtacaatgtttatactaaataaagcacaattcgaaaagctatttaactttagttccacttatcaacaatatgttaatcaatctgttgaaactttggaagaattacatgttattgaaaatttcgaacaatttacgaatgattgtttagaaagtgatactcttacaagaaggcttgttaaaacaataaaggatgaacgatttgaaaacttacaaagaaacataacaaatgtcccaagggttattgatgaatttgccttaaatgtacattttgttgatgataaaatagtttatggtgatggaagtactataaccgacataattactcttataaaaggggcatgcgtctatggagcattggatgatgaaagatacattgcatcagataccaaatctttaagaagatag

SEQ ID NO: 96496 - DNA, 600 bp, Citrobacter amalonaticus; identical to SEQ ID NO: 95808

SEQ ID NO: 96497 - DNA, 960 bp, Citrobacter amalonaticus; identical to SEQ ID NO: 95809

SEQ ID NO: 96498 - DNA, 201 bp, Salmonella enterica
  subsp. enterica serovar Newport str. CDC 2010K-2159
ttgttattttacatcagcttttccgagaactataactttaacccagtattgtcacttatcggttataaattttacgaagctgaagatgacaccggcgtaggttttgtattgatttctaaatcagtcattactgatattaaagatatcaaatttacagttattcaattaacagactacacatttctacatgttaaaggataa

SEQ ID NO: 96499 - DNA, 885 bp, Salmonella enterica; identical to SEQ ID NO: 96003
  subsp. enterica serovar Newport str. CDC 2010K-2159

SEQ ID NO: 96500 - DNA, 597 bp, Salmonella enterica subsp. enterica serovar Hadar; identical to SEQ ID NO: 95980

SEQ ID NO: 96501 - DNA, 978 bp, Salmonella enterica subsp. enterica serovar Hadar; identical to SEQ ID NO: 95651

SEQ ID NO: 96502 - DNA, 597 bp, Salmonella enterica subsp. enterica serovar Hadar; identical to SEQ ID NO: 95980

SEQ ID NO: 96503 - DNA, 978 bp, Salmonella enterica subsp. enterica serovar Hadar; identical to SEQ ID NO: 95651

SEQ ID NO: 96504 - DNA, 597 bp, Salmonella enterica subsp. enterica serovar Hadar; identical to SEQ ID NO: 95980

SEQ ID NO: 96505 - DNA, 978 bp, Salmonella enterica subsp. enterica serovar Hadar; identical to SEQ ID NO: 95651

SEQ ID NO: 96506 - DNA, 630 bp, Pseudoalteromonas luteoviolacea S4054
atgagacaaaataggcttaaattcggtgctaggttttcactgtttatagtgtcatatcttccactgttttttatcatgagcttcactcagttataccagtacaaacaatatttaaattggggtggcataaacttagtcgctataagtaacttttttaaatattttggtgccgtggctgttattggagttgtgtctattgttggtatattagggctactgatgttgctcaaaaatgttaaaagacgttgtgttcaaggcgggcgtgaagctgttgttcaggagatagaaaacaaaaatagtgagtctattacctacttgttcacttacctcattcctttcgtgtttcaagacctttcctcttttactaatgtagtttctatcgctgttctattgattgttactttcatgatctatgtaaattcaggaatgatactaatcaatccaactatcagtatgagatatacgctttaccaagttacttacaaggaccatgaaagtggcaattctcgtaaaggcatgatcataactaaatgtaactttcttgaagaaggcgacaagatagaaatggaagatgtagggcataagctattttatgcacaattaatcgaggatgataatgctgcaacttga

SEQ ID NO: 96507 - DNA, 1017 bp, Pseudoalteromonas luteoviolacea S4054
atgctgcaacttgaagacctactagagtatgccgaaaagctagagaatgatgataatgtcaaagttagcttaatgtttgttacgagaaaactaaagcctggtatgaaagcctcagccaaggtattagacaagttcgattttattttaaataaagtcgccctctctgaagagataagccagtactttaaaagtgtgctaatcaatcaaattaaaacccaagcctcaaaagatgacattgaggttaaaccatatactgttattggagatgatctccctcaagtttattcatatgcacttaataacgcgttatccttctcaaaagtaataaccgagcaagcgagagccgacaatactcctactattaactgtttgaatgacataaaaaatgacctttgggcctattgcatcaaagttaaaagtggcgacaaatacacttactctttccgaaaagtggcgaaaggaaaaattactacgaatacccctgatactcttggtaaaaagctatcagcaatgtttgacaaaagtgaagctgagctacaagagtttgacggctctgttatcagctttgacgataaaattgattgtttatgtattgatgaacagttttatgtgttccacaaatcaggttttgaacaaatattggggcttgatgaggagtttactaaaacagctcaagaaacagttgaagcaattaaggggtttgatttagttgaaggcctagacttagttgaaaaagagctacttcaaaaatcaacaattagaaaaacgctctcgagtataaagcaaaaaggtaatgacaagtctctgacaaaatttgaaatcacagcaatgaacgaaatacttcaaaagcttgaaggagaaagctttgaaattaccgaagatggtaaaataattctgagtaacagcaaagacgttaaatactttgttaagctgctaaatgactactacaaacaagggatgaccaccaagaaatactatacttccaacgctggcagtattatcgatccccaaggatag

SEQ ID NO: 96508 - DNA, 621 bp, Methanosarcina mazei
atgagtaaacacaccgaaagtattcatattttggataaagtaggattatacgtaacttcgttgtggcttctatttttcctgttaatagtactaacaattgatgttccaattacttttagtaaaaattatatttttattggttttgaggaactactaaaaagaaatattattccgatcattagttttgtgttccttatttttggtattatatactgtttctatttcgattataaatttaaagggacagcgccattacaaatagaagtacaagaaattaagaatgtaaattatgaacatatcctattcctcacaacttatataataccattattaagttttgacattagtaatataagatatcttctgttactgttcttgctattggttatcatatgtgcaatttatatacagacgaatttattttatgcaaatcctactcttgcactactgggttatcatatttatgaaatgacaggcagtagaaaaaaggaactagagactgaaacttataaaaatataatcgtgatcactaaaacaaatatatcattaaatgatgaagttcaattattatttttaagtgacaatatatattttggaaggaaatatgaacacattgattga

SEQ ID NO: 96509 - DNA, 933 bp, Methanosarcina mazei
atgaacacattgattgaaaacttgaaccatattttgagaggtactatatcaattgttgtttatttcaagcttaaaaatggtgaggtgagacttgctgatattaacaacaatgtgttaccacgcattttaacattatataaaaataaaattagtgaagaaattattaataaagaaaatttggaattattgaaactttcagagatggatgaaagaaaaaatgttatttacaaatatgattttgacaaagatagagaaccttttttgagtatgaagcaagttgttgaggatgaagaaataaaaacattcagcatctccaatgacacattagaaaatatcgatggaattattgctaaaatcagtaattctaatcatggcatattcttgtatactaaattttaccctgtaaacttaattaagccaggtaaatcaataaacttgttcccatcagatcaccgtttagaaatgtttgatgggaaactaattcaaattacgggcaaatttgatattttaagatacaacaacgaatattatatcaaaaaacacgaaatactggagaaattttaccaatttaacgatgtaataacagagagagctaaaagttactttgaagagatcataaaaattaaaataattgagaatgaagcgaagttattttcataccttgaaaataatccttcacgtgcccgaaagttcataaaagtaatggcttcatcacttgttattaaaaagaaaattcctaaagaacagttaatttcatttgtttcaaataatcctaaattaaaagataatattgaaacaagtgaagacaagactaaatttaaattaaaaacaaataatcattgtaatttctttattaaactgttagatgatgattttttgaaatcagaattgacacaagaagaatatgaagcacttgctaagaataatgtttaa

SEQ ID NO: 96510 - DNA, 621 bp, Methanosarcina mazei; identical to SEQ ID NO: 96508

SEQ ID NO: 96511 - DNA, 933 bp, Methanosarcina mazei
atgaacacattgattgaaaacttgaaccatattttgagaggtactatatcaattgttgtttatttcaagcttaaaaatggtgaggtgagacttgctgatattaacaacaatgtgttaccacgcattttaacattatataaaaataaaatcagtgaagaaattattaataaagaaaatttggaattattgaaactttcagagatggatgaaagaaaaaatgttatttacaaatatgattttgacaaagatagagaaccttttttgagtatgaagcaagttgttgaggatgaagaaataaaaacattcagcatctccaatgacacattagaaaatatcgatggaattattgctaaaatcagtaattctaatcatggcatattcttgtatactaaattttaccctgtaaacttaattaagccaggtaaatcaataaacttgttcccatcagatcaccgtttagaaatgtttgatgggaaactaattcaaattacgggcaaatttgatattttaagatacaacaacgaatattatatcaaaaaacacgaaatactggagaaattttaccaatttaacgatgtaataacagagagagctaaaagttactttgaagagatcataaaaattaaaataattgagaatgaagcgaagttattttcataccttgaaaataatccttcacgtgcccgaaagttcataaaagtaatggcttcatcacttgttattaaaaagaaaattcctaaagaacagttaatttcatttgtttcaaataatcctaaattaaaagataatattgaaacaagtgaagacaagactaaatttaaattaaaaacaaataatcattgtaatttctttattaaactgttagatgatgattttttgaaatcagaattgacacaagaagaatatgaagcacttgctaagaataatgtttaa

SEQ ID NO: 96512 - DNA, 621 bp, Methanosarcina mazei; identical to SEQ ID NO: 96508

SEQ ID NO: 96513 - DNA, 933 bp, Methanosarcina mazei; identical to SEQ ID NO: 96511

SEQ ID NO: 96514 - DNA, 621 bp, Methanosarcina mazei; identical to SEQ ID NO: 96508

SEQ ID NO: 96515 - DNA, 933 bp, Methanosarcina mazei; identical to SEQ ID NO: 96511

SEQ ID NO: 96516 - DNA, 621 bp, Methanosarcina mazei; identical to SEQ ID NO: 96508

SEQ ID NO: 96517 - DNA, 933 bp, Methanosarcina mazei; identical to SEQ ID NO: 96511

SEQ ID NO: 96518 - DNA, 594 bp, Janthinobacterium sp. KBS0711
atgcagccacggctttacgtcgcaatttttgtctatctcggatcatatctcccattgagtcttattcttctggtccaggaatacgatttcgatgcgccaagtctcccgttttgcaaaatatggcagaacgcctcatcctgctacataccattcagcaacagcaaagccgctctttctttcgtaatcctttgtttttctgcattcctcgtgactttattcatcctaatgacgattaaaggcagcaataaaataaagattattgaaagcaaacacattcctgccgatttaattaattacgttttcccttacgtagtctcatttatgagtctagattataagggaactggaaaaatgattggttttttaatatttttaatctggatgtttttggtcacttacaaatcgggccaactcatgttaaatccacttcttataatatttggctggcgtttgtacgaaataaagtatcaatacttaggtggcaccaatattcactctggacgagctctttcagatgacgaactacaacccaatgtcacctacagcaaaaacgatattcaagacatattaactataaaacaaaggagtgtatag

SEQ ID NO: 96519 - DNA, 933 bp, Janthinobacterium sp. KBS0711
atgccgactgctcttgaaacccttctcgcattcgatgtcgaaaattccgagatcatattatggacgttcaaaaagacgttgtacactggtgtagatgcaccggtctacaccggtcattgggttgagataagcgaaaatctaaaagacgctattcgagatgcacttgtatacgaaatagttcgtataacagaggtgttggagtatgggatacttgctcaaaacaacgaaggaagcgccctttcaattgaggcagatgaaacgtatgccggattgattttggagaaaattggcgatgaagtgctcaacaaaaaaataaaaaatttaaaggaaataaataattctgctttttatgtgttgaaggttgttgcgccagatcgcacaaaattttatgcagcgagaaaaacggacgactcttggcattcaagaaaaagcaatggtacgatatctgccctctttggtgatgatagtcttgatataaattatcaaagaaatttcaatatttctaatcacgtagattttttcatcgtagaggacaagttaattatttcaggaaaagcaaatttcgaatctgttctcagctataagcaagctcatcttgaagattttactgcgttaacccagcaagttgatttttcaaatattttttccaatgtggcgccggttgtcgaatatgttggaaaaaataaaatcagactcagacgtgccctagccatacaccaaaaaggacattataaggatccagctttcatgggtcacttgcgcattaactacaccgattatggtttagcactacaattcgatcaaaatcttaaattagtcgttacggaaataaattgccgcgacgtatttacagccttacttgaccacagattaaaatcaccgttttcgcaaaatgtttatgacgtccaagatacaaacaacgtggttatttag

SEQ ID NO: 96520 - DNA, 612 bp, Listeria monocytogenes; identical to SEQ ID NO: 96206

SEQ ID NO: 96521 - DNA, 942 bp, Listeria monocytogenes; identical to SEQ ID NO: 96207

SEQ ID NO: 96522 - DNA, 588 bp, Vibrio parahaemolyticus; identical to SEQ ID NO: 96174

SEQ ID NO: 96523 - DNA, 987 bp, Vibrio parahaemolyticus; identical to SEQ ID NO: 96175

SEQ ID NO: 96524 - DNA, 597 bp, Salmonella enterica subsp. enterica; identical to SEQ ID NO: 95980

SEQ ID NO: 96525 - DNA, 978 bp, Salmonella enterica subsp. enterica; identical to SEQ ID NO: 95651

SEQ ID NO: 96526 - DNA, 588 bp, Klebsiella pneumoniae
atgaaaagcaaaggcacatttaataagatagggttgtacatactatctttaatgctgttgtttgtttttattatcatcttaagtgcaaaaattccgatgtgttatggtgactcatgtgaatttataggtttttataaattagccatcgacaatgtaataccaataatatatttcttttttatttttttagcatgctatttttataagaggcttcgctcattaattaaaataaacaatgctgacactgttacaataacatcctgccaaagtgagaattatgaaagtttaactttcttaactacgtatatagttccttttatggggttcagtttcgatgacattcagaaaaatattgcttatcttttgttagtaataatcattggtttaatcttcatcaaaacggacaaatattatgcaaaccctacgctagccctttttggatacaaattatatagagttaatgtttcttatacaggaagcgttgaagttaaaaatgttattgcaatatccactgatattttggctgttaacgacaaggtcttttacagttttttagatgattatgttttcatagcaagaaaaaaatga

SEQ ID NO: 96527 - DNA, 960 bp, Klebsiella pneumoniae
atgactcctgaaattcttaagagtgaagtttctgatatcttcgataattttactggcatcagaattattttcgttgtgaagattgaggatagttattctttaaaattatcaaaaattgaagcagaggctctgccgaaaattgttgaaggatttaaaagaaaaattgaagaggacatgatagaaaatgatgatttgaccatacctttcctatcaaattttgatgatagaaataatgctctatttaaatttgattatgaggaacaacctaaagaatttggatttattaaaagtgctacaaccataccccctaactcgcaggatttttatgatttgaggaataaatttaccgatgttaaagggataataattcaattacgtggaaataataagtgtctatctttgtataaaaacaaaaccaaccttaccgtgtttgaacaaagccgtaaattattcaatttgatacctgattcggatggttacttgaaagagttaccaaatcaagtatttagattggattacaactacgaccttgctctcctggataatgattttttaataaaaaaccagaaaactctcgaagttacaatgcaattccaccaaattattgaagctcaggcgactgtcgctctggaatctttaaggtcgtcatcattaattgatgacctttctcaccttgaaaaaagcgcaaaagaaatatctttctcaagaaaacttgccaaaatctcaaaacactcccctgttttaggaaaaattgatgtcccagtaatcatccattatgttagtcatcatacatacttatctacagtattaattgttagtgaggatggtagaaagctaattataaagactaaagagtctaaaaaacatttcataaaattattaagtgatgactatcttgagtctcctctaacgaaaattctctacgactcactagctaaagatgaattaaaaacaaattaa

SEQ ID NO: 96528 - DNA, 588 bp, Vibrio parahaemolyticus; identical to SEQ ID NO: 96174

SEQ ID NO: 96529 - DNA, 987 bp, Vibrio parahaemolyticus; identical to SEQ ID NO: 96179

SEQ ID NO: 96530 - DNA, 516 bp, Candidatus Synechococcus spongiarum 15L
atgcttagcggtactgccaaggtggtcttgacggcaacagctatcgcgccggctgggcttacctatgcctatgctgctttcatggcggacaagacatgtctggctatcggcctactatgcggatcggtcatttgtaccgtactatgccttttcctcctgggctacgctcggaaacacttggagcgcatgaaatttaccgcaattaaggttgaggccgctgaccatgagaatatggcaatattactgttgtacttatctcctctattcaccgcaaatttcaacgcattgaaatggcctatattgatactgacgctgctgatttttgctcttgtgatcggaacaaggtacggctatcacttcaatccgctactgggtctgcaggggtggcatttctacaaagtcgcaactcctgagggggttacctatgtcctgatcaccaaaaagcgtctccgcgacgcctgcggtaggctggttgtcggccagcttacggagtacattgtccttgacttggagtaa

SEQ ID NO: 96531 - DNA, 891 bp, Candidatus Synechococcus spongiarum 15L
atgctcatgtccatgcccagaaatttctttgctttctgtaggggtgctgaccaggacagcattcgaagaatccctcttgatgctgacacccaaaatgcgctgggagtcctgtttgacgatcaggagcaacagttcctggaaggtcgtgaggaggaagtaccattcaccggggactggaaacctgatgacgatcagttgctgacaatcactgacgaagaactggctcaacctctggtgaagaccttgcatgaaaatgtgacagtatttgacgagctggacattaaaaattttaataaatctggaataaaggcaatttttactcgctcatctaaacaagaaaatcgtattctcattcagcaattcaagtcatcacaatatcttggaccagggaaatggaatctaatctttgataaaaaccggtttaagcagctctctcagcctggatttacactagcttccaatttggctgcagttctagatggcagcgtgttcaagtttcagagctttcaaaatctccgaattatctttaaagtacaacatcattttcaagaagctactcatcaggaagttagaaagtttgcagatcattcctcattatgtatagataatcatgatgaatttatgaaactcatgactgaacgcattcgaaaattgattaaaagtatcataaaatctcaaattctagaaaattatgagactgacgaaatcattcagaaggcacgaagtgttggcattgagcttaaaagtaaagaaaataagattattattacaaatagcaagttagaaatcaagactgtactcagcttcttggaagactcagtcttcaggggatcgttctcagaggaaacttatgagacaaactccaagcgtgctgtgaggcgagagcaataa

SEQ ID NO: 96532 - DNA, 513 bp, Nitrosomonas communis
atgcgaaattggcttaaaacactattgtttgtttcttctttttccccagctcttattactacggcatatgttcgatatgatctctatggctggagtatggatgtctttcaattaattatttttggactacttggaattcttttgcctatcttaattattaaactagtagagcaacagggagaaacatttcatattcaagcgaagaaaattgaacctaatgatttcatgcttcttgcattcgtcggtagctatttacttccacttattttaaatagtgcaaaaatatcaatagatactattgttgttattttggttattattggtctacttttgtggctaattagctctctcccggcacatcctttgttgaggatctttaaatttagattttataaacttgaatcatcagcaggaatggtttatacattgatatcgaagcgggaaattagagatccaaaagaaattaaatttgtaaaaaagctttccgagacaatgctcatggagattaaataa

SEQ ID NO: 96533 - DNA, 492 bp, Nitrosomonas communis
atttttcattcattaaacgtctatagaaagatagaaggaatcggtcttactatagacaataagttaaccgcaatcattcgaaatggcgcgctcaaattccatagctttcatctgctgaggcagatttttgatgtttcggaatattataaagaagcaacagatgttgatattcagcagtttgcgaatatggcttgtgtttctgttacaaatactgcaaatttagtctcaatttcagatacatggattcgcagaaaactttggttgatatcacaaagtcaaatattgcaaaaagttccagtttatgacatcaaagctgttgctgcagaatttaatatatcacttgatactaaaatggaaaacggaagtgaaaagatagaaattccagataccaaaaaagagctcaaaacccttcttagatttttggatgaggattattataaatcacctcttcttcagaatcgctatttaacgaactcaaaacgccttatataa

SEQ ID NO: 96534 - DNA, 585 bp, Xanthomonas perforans; identical to SEQ ID NO: 95666

SEQ ID NO: 96535 - DNA, 930 bp, Xanthomonas perforans; identical to SEQ ID NO: 95667

SEQ ID NO: 96536 - DNA, 585 bp, Xanthomonas perforans; identical to SEQ ID NO: 95666

SEQ ID NO: 96537 - DNA, 930 bp, Xanthomonas perforans; identical to SEQ ID NO: 95667

SEQ ID NO: 96538 - DNA, 585 bp, Xanthomonas perforans; identical to SEQ ID NO: 95666

SEQ ID NO: 96539 - DNA, 930 bp, Xanthomonas perforans; identical to SEQ ID NO: 95667

SEQ ID NO: 96540 - DNA, 585 bp, Xanthomonas perforans; identical to SEQ ID NO: 95666

SEQ ID NO: 96541 - DNA, 930 bp, Xanthomonas perforans; identical to SEQ ID NO: 95667

SEQ ID NO: 96542 - DNA, 585 bp, Xanthomonas perforans; identical to SEQ ID NO: 95666

SEQ ID NO: 96543 - DNA, 930 bp, Xanthomonas perforans; identical to SEQ ID NO: 95667

SEQ ID NO: 96544 - DNA, 585 bp, Xanthomonas perforans; identical to SEQ ID NO: 95666

SEQ ID NO: 96545 - DNA, 930 bp, Xanthomonas perforans; identical to SEQ ID NO: 95667

SEQ ID NO: 96546 - DNA, 585 bp, Xanthomonas perforans; identical to SEQ ID NO: 95666

SEQ ID NO: 96547 - DNA, 930 bp, Xanthomonas perforans; identical to SEQ ID NO: 95667

SEQ ID NO: 96548 - DNA, 585 bp, Xanthomonas perforans; identical to SEQ ID NO: 95666

SEQ ID NO: 96549 - DNA, 930 bp, Xanthomonas perforans; identical to SEQ ID NO: 95667

SEQ ID NO: 96550 - DNA, 585 bp, Xanthomonas perforans; identical to SEQ ID NO: 95666

SEQ ID NO: 96551 - DNA, 930 bp, Xanthomonas perforans; identical to SEQ ID NO: 95667

SEQ ID NO: 96552 - DNA, 585 bp, Xanthomonas perforans; identical to SEQ ID NO: 95666

SEQ ID NO: 96553 - DNA, 930 bp, Xanthomonas perforans; identical to SEQ ID NO: 95667

SEQ ID NO: 96554 - DNA, 585 bp, Xanthomonas perforans; identical to SEQ ID NO: 95666

SEQ ID NO: 96555 - DNA, 930 bp, Xanthomonas perforans; identical to SEQ ID NO: 95667

SEQ ID NO: 96556 - DNA, 585 bp, Xanthomonas perforans; identical to SEQ ID NO: 95666

SEQ ID NO: 96557 - DNA, 930 bp, Xanthomonas perforans; identical to SEQ ID NO: 95667

SEQ ID NO: 96558 - DNA, 585 bp, Xanthomonas perforans; identical to SEQ ID NO: 95666

SEQ ID NO: 96559 - DNA, 930 bp, Xanthomonas perforans; identical to SEQ ID NO: 95667

SEQ ID NO: 96560 - DNA, 585 bp, Xanthomonas perforans; identical to SEQ ID NO: 95666

SEQ ID NO: 96561 - DNA, 930 bp, Xanthomonas perforans; identical to SEQ ID NO: 95667

SEQ ID NO: 96562 - DNA, 585 bp, Xanthomonas perforans; identical to SEQ ID NO: 95666

SEQ ID NO: 96563 - DNA, 930 bp, Xanthomonas perforans; identical to SEQ ID NO: 95667

SEQ ID NO: 96564 - DNA, 585 bp, Xanthomonas perforans; identical to SEQ ID NO: 95666

SEQ ID NO: 96565 - DNA, 930 bp, Xanthomonas perforans; identical to SEQ ID NO: 95667

SEQ ID NO: 96566 - DNA, 585 bp, Xanthomonas perforans; identical to SEQ ID NO: 95666

SEQ ID NO: 96567 - DNA, 930 bp, Xanthomonas perforans; identical to SEQ ID NO: 95667

SEQ ID NO: 96568 - DNA, 585 bp, Xanthomonas perforans; identical to SEQ ID NO: 95666

SEQ ID NO: 96569 - DNA, 930 bp, Xanthomonas perforans; identical to SEQ ID NO: 95667

SEQ ID NO: 96570 - DNA, 585 bp, Xanthomonas perforans; identical to SEQ ID NO: 95666

SEQ ID NO: 96571 - DNA, 930 bp, Xanthomonas perforans; identical to SEQ ID NO: 95667

SEQ ID NO: 96572 - DNA, 585 bp, Xanthomonas perforans; identical to SEQ ID NO: 95666

SEQ ID NO: 96573 - DNA, 930 bp, Xanthomonas perforans; identical to SEQ ID NO: 95667

SEQ ID NO: 96574 - DNA, 585 bp, Xanthomonas perforans; identical to SEQ ID NO: 95666

SEQ ID NO: 96575 - DNA, 930 bp, Xanthomonas perforans; identical to SEQ ID NO: 95667

SEQ ID NO: 96576 - DNA, 585 bp, Xanthomonas perforans; identical to SEQ ID NO: 95666

SEQ ID NO: 96577 - DNA, 930 bp, Xanthomonas perforans; identical to SEQ ID NO: 95667

SEQ ID NO: 96578 - DNA, 585 bp, Xanthomonas perforans; identical to SEQ ID NO: 95666

SEQ ID NO: 96579 - DNA, 930 bp, Xanthomonas perforans; identical to SEQ ID NO: 95667

SEQ ID NO: 96580 - DNA, 585 bp, Xanthomonas perforans; identical to SEQ ID NO: 95666

SEQ ID NO: 96581 - DNA, 930 bp, Xanthomonas perforans; identical to SEQ ID NO: 95667

SEQ ID NO: 96582 - DNA, 585 bp, Xanthomonas perforans; identical to SEQ ID NO: 95666

SEQ ID NO: 96583 - DNA, 930 bp, Xanthomonas perforans; identical to SEQ ID NO: 95667

SEQ ID NO: 96584 - DNA, 585 bp, Xanthomonas perforans; identical to SEQ ID NO: 95666

SEQ ID NO: 96585 - DNA, 930 bp, Xanthomonas perforans; identical to SEQ ID NO: 95667

SEQ ID NO: 96586 - DNA, 585 bp, Xanthomonas perforans; identical to SEQ ID NO: 95666

SEQ ID NO: 96587 - DNA, 930 bp, Xanthomonas perforans; identical to SEQ ID NO: 95667

SEQ ID NO: 96588 - DNA, 585 bp, Xanthomonas perforans; identical to SEQ ID NO: 95666

SEQ ID NO: 96589 - DNA, 930 bp, Xanthomonas perforans; identical to SEQ ID NO: 95667

SEQ ID NO: 96590 - DNA, 585 bp, Xanthomonas perforans; identical to SEQ ID NO: 95666

SEQ ID NO: 96591 - DNA, 930 bp, Xanthomonas perforans; identical to SEQ ID NO: 95667

SEQ ID NO: 96592 - DNA, 585 bp, Xanthomonas perforans; identical to SEQ ID NO: 95666

SEQ ID NO: 96593 - DNA, 930 bp, Xanthomonas perforans; identical to SEQ ID NO: 95667

SEQ ID NO: 96594 - DNA, 585 bp, Xanthomonas perforans; identical to SEQ ID NO: 95666

SEQ ID NO: 96595 - DNA, 930 bp, Xanthomonas perforans; identical to SEQ ID NO: 95667

SEQ ID NO: 96596 - DNA, 519 bp, Enterobacter aerogenes
atgcttaatggatttgctcgctatgctttgactgctagttcggttgccccagtttgcctgacattggcattcttagcttatatcaatgataattataagattcttgtttcctcaattcttttggctgtcataagtgtggttttttgtgtctttataatcaaacaagcacaaaaatataatccggtcacattgaaaaacttagaatcggcatctccggcagataaggaaataaccaactatttcttgacttacttgtttccacttatatctgggccgaccacttttatggattggcgattagctctgtttttttatttaagtcttttcttctacataaagcactcgtcttcgtatagtttcaatccaattttgtctatcatatttggattcaagttctatgaagccgaagatgacactggggtgagttttgttcttttgtcaacaaaacctcttaccaatgcgaagatcaaaggtttgagggtaaagaagcttactgaacatacctatatgattgtataa

SEQ ID NO: 96597 - DNA, 894 bp, Enterobacter aerogenes; identical to SEQ ID NO: 96079

SEQ ID NO: 96598 - DNA, 594 bp, Enterobacter aerogenes
atgaaaaaaagaacaggtttaaagtatgcattatatatattgtcactgtggctattatttgtttcactttttataatgtcatatgataagaatctttttgtaagtatatcatcatatctggacagcaaagatacagaaatattaatctcaagcatcacgcctaaaaatatagtttttatttccagctttgcaatgatagtagcaggcgttttaatttttctatatttactattttcctttaactctggttggtcagtagcgtgcaccgtttctgatgttagaaatgaaagtcatgagcatcttgaattcttaactacctatgttatgcctctggtatttactgatgtgaacagcaagaggactatgctgaatcttttgatcatgatagtagctatagggatgatttatgtaaaaacaaatcgtttttattccaacccatcattagcattgcttggatttagaattttcaaagcaaatataaatgatagaggaaccaaggaatttgtaatcatttgccatggcgaaattgatagcaacagcagaataaaatatatcaagctagataacaatacatgtcttgctaaaataacttaa

SEQ ID NO: 96599 - DNA, 978 bp, Enterobacter aerogenes
atgttcacagcaatagataatatattaaattcagcccaactttccggcgaggcttattttgttgcagaactccaagggcaactagatattttcagagttgctctagaaccaggggcagaacagaaattaacacagtctttcagtcaatcacttaagcgtgatgttgttgacccaaacactggacagaacgctttgccgttagtttcttctctgctaagtcgagataagcaggtgcatgagtatgatcaccaagtaataaaccatcttccacctgctctagcaaagatggcggacgtgcttagctttggagttaataatacccccactgattttgactttgcccagcaaaacctatcaaccgttaaaggaatagtttattatctttgtgatggccaaggtaacggagttgttgtttaccagcacaaatatccaatcgcactacataaaaaaacaaaattgtcatacttctctgcgaatggtagaacccttgatgaggtcactcatgatagcattgacataaatgggaatgtggatttcttttattttaacaacaagtattatgcactaaacatcaacttacttgaaagagcgtatggccttgaacaagtcataaacaatttagcggcaaatgcaactcctcatataatcgcactgaacatcctagacgtatcaaatcatccgaaccctgcagacatttttaatgacatgcatcgaaatagaaatttcatgcgcagacttgccaccacagcaaatagcccactaatacagaatggaactattaacatagccaccattcagacattaattcaaaacttcccgattcttgggaggaatataataattaaccaagctggattgatagaattatcatctcaaaagcaaaaactatatttcattcgcctgctaaataatgaggcatctttcacagcattaaaccgagagccttttcttgcggtcggaaaagactcagcggcataa

SEQ ID NO: 96600 - DNA, 594 bp, Enterobacter aerogenes; identical to SEQ ID NO: 96598

SEQ ID NO: 96601 - DNA, 978 bp, Enterobacter aerogenes
atgttcacagcaatagataatatattaaattcagcccaactttccggcgaggcttattttgttgcagaactccaagggcaactagatattttcagagttgctctagaaccaggggcagaacagaaattaacacagtctttcagtcaatcacttaagcgtgatgttgttgacccaaacactggacagatcgctttgccgttagtttcttctctgctaagtcgagataagcaggtgcatgagtatgatcaccaagtaataaaccatcttccacctgctctagcaaagatggcggacgtgcttagctttggagttaataatacccccactgattttgactttgcccagcaaaacctatcaaccgttaaaggaatagtttattatctttgtgatggccaaggtaacggagttgttgtttaccagcacaaatatccaatcgcactacataaaaaaacaaaattgtcatacttctctgcgaatggtagaacccttgatgaggtcactcatgatagcattgacataaatgggaatgtggatttcttttattttaacaacaagtattatgcactaaacatcaacttacttgaaagagcgtatggccttgaacaagtcataaacaatttagcggcaaatgcaactcctcatataatcgcactgaacatcctagacgtatcaaatcatccgaaccctgcagacatttttaatgacatgcatcgaaatagaaatttcatgcgcagacttgccaccacagcaaatagcccactaatacagaatggaactattaacatagccaccattcagacattaattcaaaacttcccgattcttgggaggaatataataattaaccaagctggattgatagaattatcatctcaaaagcaaaaactatatttcattcgcctgctaaataatgaggcatctttcacagcattaaaccgagagccttttcttgcggtcggaaaagactcagcggcataa

SEQ ID NO: 96602 - DNA, 594 bp, Enterobacter cloacae
atggatagcaggccatatcttaaaacagtactatatatactatcactgtggcttctatttttatcattattaattatgtcctacgataaggttttgataaaaaatgtgtggaactatatttttactgaaaactttactttcccgatctcgtcattgaaagtgagaaatatcgttttcatagttagtttgattttcatcttcattggtgcaattattttaataatccttgcgaatagcttcggttcgggttggtccgttgcatgtaccgtatcagatattagcaatgaaaatcatgaacatttagagtttttaaccacttatataatgcccttagtttttactgatgtcgatagtaagcgaaccgtattaaatttagggttgatgatatttgtaatcggcgcaatatacgtaaagacaaaccggttttattctaacccatcacttgcaatactcggattcagaatatacaaagctaatgttcatgaccgtggagtgaaaaaatgcacagtaatctgccgcagtgttctaaagagtacagataatataaagtatataaaaatcgacgatgaaacttatttggctaaaatagtgtag

SEQ ID NO: 96603 - DNA, 972 bp, Enterobacter cloacae
atgttcactaacattgaaaatattttaaaatcgaaacgcatctctggcgaagctttttttgttgctgatgttcaaggtacgatagatatatttaaggttaaccttgaacctgatgctgaaaaagatctgaccacttcattttctaaaagcttaatcaataatattattgaacctaacagaggtaaagtggccgttccacttgtatccactttattagaaagagataaacaagttttcgaatatgatcacttagcaattaatcacctcccaattgaatttactaaaatgaacaacgtgctaaatttcggtgtcaatgggaatgcaacacagtttgattttgcaacacaaagcctcacatcggtaaaagccgtaatttaccacctttgtgatggtaatggaaacagcgtagtcatttaccaacataaatatcctgtttctctacataagaaaacaaaaaaatctttcttgagtctaaatggcagaaccttagataagatcactcatgacagtattgatataaatgacactattgacttcttcttttttcagaataagtactatgcgctaaacattaaacttcttgaaagaatgtatggattagaaagtgtaatagataatcttgcaaataactcaacgccattaataataaaccttggaattgttaatacacaaggtatgccagtgccactagatattttcaaggatatgtataaagacagagcatttatgcgtagacttgctatggtttcaaaagggaacttagtaaaaacgggagtttcagtccctcaaatacaacaagttatgcaaaaattccctgtatttcaacggaatattgatctaacaggaggattaataaaccttaatactaaagatcaaaagagatactttattcggcttctaaataatgaagcatcttttgcagcacttgataactcgcccttcctggctgttgaaaaagactccgctgcttaa

SEQ ID NO: 96604 - DNA, 516 bp, Escherichia coli; identical to SEQ ID NO: 95682

SEQ ID NO: 96605 - DNA, 894 bp, Escherichia coli; identical to SEQ ID NO: 95683

SEQ ID NO: 96606 - DNA, 522 bp, Escherichia coli
atgatgaacaaattagcacgcttattattaacagccagctcaattgcacctgtttgcgcaactctattttttattggatatgtaaaagatacggtttggctgatgcaatatagcttatgcgttggcatagcaagttggttattagcaataggcctgattcaatatgctgagaaacaacttgaacctctgacaaaaaatattagttcagtttctcccgctaacaaagaagtaactaattatttcttaagctatttattccctctcctaggaacagattctattgctgaaaataaagcatatgcgttattcttttatttatcattgttattttacatcagcttttccgagaactataactttaacccagtattgtcacttatcggttataaattttacgaagctgaagatgacaccggcgtaggttttgtattgatttctaaatcagttattactgatattaaagatatcaaatttacagttattcaattaacagactacacatttctacatgttaaaggataa

SEQ ID NO: 96607 - DNA, 885 bp, Escherichia coli; identical to SEQ ID NO: 95659

SEQ ID NO: 96608 - DNA, 516 bp, Escherichia coli
atgttaaataagcttgccaaatatcttcttactgccagctcagttgctccggtattttttaccttagcttttctttcatgtatatcaaaacactataaatttatgattgcttacttatcattgtgtgcaattatacttttactgtgtattttgattgttaaatacgcaattaaatataattctgtaaccagtaaaaaattaaccaccgcttctccagcagataaggagataacaaattatttcttaacctatttatttcccttaatcagtggtccagatgcatttatggatattaggattgcttctttctttgctgtgagtttatttttttacatcagtttttcaggttcctacagtttcaacccattattatcattttggggatataaatattatgaagccgaagacgatacaggcgtaagctttgttatattatcgaaaaagccactattaaaagcatcaggcaatcgtgttaatttgattaagcttactgattacacatatatagcaatatag

SEQ ID NO: 96609 - DNA, 894 bp, Escherichia coli; identical to SEQ ID NO: 95941

SEQ ID NO: 96610 - DNA, 549 bp, Polyangium brachysporum
atgaaactgcgcttctggccttcgctgctgattttcgcgagttcgtacttcccgctcgcgttggtcgtgatcatcaaggatctcgacccgggcaccttctggcctcagcacccgaagatggcgctggccatcatcgtcagcgccctgctgtgcatgttggcgctctacgtcaccgtgcgctccatcccgcccgggttgccggtgctggtcacacgggtgagcaacaagtcgggcgagctggtcgcctacaccttgccctacatgatttcgttctaccgcttcgacctcggcgactggcgcaccttgttgtgcctgctgttgttcctgggcatgatgtttgcgctgagctatcggacccgcaacattctcgtcaacccggtgctggggttggtgggctacggcctctacgacgtgcagttcaaggaaggcgcgcgcgaccgtcaaggcttgttgctgtcgcggcaagagttccgcgtgggcgaccgttgccacgtgacgcggctgtccaacttcctgtatttcgtcaagaaagtcgaagtcgacgaatga

SEQ ID NO: 96611 - DNA, 936 bp, Polyangium brachysporum
atgaaggccgagccgctgcccgctgccacgatggcgctgcacgacaccgattggtcgtctgccaccgcctcgctctggatcgtcaaacgccggctggtcgagcggcgtgcgcgctacgacgtgctgggcgtcgacatcgacgagaagttgcaggagcggctgcgcagcgaattgcgcgagctggtggcccgcccggtggcccgcgagccctatgagttcgtcacggcagaccaggacgagaccgtgctgacactcgaatgggccgagaccgactttgcggccatcgaagcgcgcattgccaaaggcctcgatgcgccgcgcgcgagatctgtcgacgacttgctcaattcctggtgttatgtggtgcggctcgagcaccgggaccaggtggtctacggcgtcaagaagacggcggcccaaagcagcacgcggcgggtcagggggctgcgcaacctgctctgggaagggcacatgctggtggacctcgacgaacgttccgtgttcacgctggccagcggttttgacttcgtggcctacgacggcacgctgttgatctacgacaagcggcagttcgagagcgccttgaacttccggcaaggcatggagaaggtgcgcgacgcggtgctgcaggagttcgtcgacgccggcatcttcgtcgacgtggccccgctgcgcgaggcggtcggcaccaatctgccccgcttgcgccgcatgtcggccctcgaccgcagcggctactaccgcgaccgccgcttcatggagcgattgctcgcgctcaatgaacaggagcaatggggcctgcaggtgcacgacggccgcatcgtcgtgaccgaggacaacgtcgacacggtgctgctgttgctcaacaacggccgcttgcgctcgccggtcaacaacgagaccttcgatgcgctggtgaaaaagaagatcgaatga

SEQ ID NO: 96612 - DNA, 510 bp, Aeromonas hydrophila NJ-35; identical to SEQ ID NO: 95886

SEQ ID NO: 96613 - DNA, 888 bp, Aeromonas hydrophila NJ-35; identical to SEQ ID NO: 95887

SEQ ID NO: 96614 - DNA, 588 bp, Xanthomonas translucens pv. undulosa
atgaatatcaaccgaaccgtcgagaagttcgagctctacattctttccctgtggctcttgttcttgctcatcatcgtcgtgacgattgatatcccaatatgcgcccagcctgattgcagcttcatcggcttaaaggcgctggtagtccgcaatgtcgtgccagccgtggcactcgcattggtggggcttggggtcttgtactacctcaggttcaactacaagattgccggcagcaagtcgatacctgttgaagtatcttcaatcgaagacatcaactacgaacacttgacgttcctgaccacgtacatcatcccgctcatctgcttcaatctaacaagcgagcgctatctaatcgcgctgggattgctccttgtcgtgatcggaatcatctacgttagaaccgacaagttctacgcgaacccgactctcgctgtacttggctttcgtctgtactccgcgaaagtgactcgtcgaaccggcgaagaggtcaaggtaacgcttattacaagagaccagatcaaggacggagacaagattcgctttcttgaactggatagtcgtgtttactacgcaaaggggagtgcatga

SEQ ID NO: 96615 - DNA, 969 bp, Xanthomonas translucens pv. undulosa
atgagtcttgatctacttagggcgcaaatatccgaagtgatttcggatgatgcctgctcagccgagttctacttcttcctggaagatgcgggccaaatttcaattaaacgagcggacatcgatcagagtgcttctgatgaactaactcggaacttcatcgaaacgatcagcagcatgattctgctggatgacgatttgtccttgctgaacatatctggtgccgatgatcgttcaaacgccatctatcgctatgacttaccagaagtgcccgttcagattcaacatctagccaccatccttcagcgtgatgactttgaagtcttcagcttcgaggatgacgacttggcgaatctgaaggggatactcgtcatcctcgggcacgggcagcagcaactagcgctatacaagcaccaatacccagtggcgcttctcaagcgagacagcgctttcagccttgttcgcattcggaatcagaataggctggtcaagctcgaggacgacattcttcgcatcaactcaaagtttgatttcatgcgtataggcaatgagtacttcatcgtcgacatcaagacattagaacgatttttcggattccatgatgcggttcgaaacatcgcaacgcaaggaattgccaacatcgatcacgcgcagttggtgatcgatacaggggtgctttcggctaggctcgatgacatctcgttctcgcgaaagcttgttagggctgcaagagcttcgcctgtccttggcgttattccgaacgaccaagtaattgcattcgtcggcactcatcccgcgcttcgaggaaagttccggctcagcgacgatgggtccaagctcaagttggataccaaggtttcgcaggatcttttcctcaagcttttaaatgacgactttctgcaatctgagctgacgaagcgctactacgcaagccttgcaaaagacaatctcgaagcggccgcagcgctctaa

SEQ ID NO: 96616 - DNA, 516 bp, Klebsiella pneumoniae
atgttaaataagcttgccaaatatcttcttactgctagctcagtagctcccgtatttttcaccttagccttcctgtcctatatatcaaagcactacaaattcatgattgcttacctatctctaggtgtaactattcttttattgtgtgttttgatcgtcaagtatgcaataaaccataactctgtcactaataaaaaattaacaaatgcctctcctgccgataaggaaataacaaattactttttaacttatctgtttcccttgattagcgggccagaagctttcatggacgtcaggattgcgtcattttttgctttgagtttgtttttttacatcagcttttcaggctcttacagcttcaacccattgttgtccttttggggatataaatattatgaagctgaagatgatacaggcgtaagctttgttgtattatcaaaaaaaccattgctaaaggcatcaggcaatcgtattaatttgattaagcttactgattacacatacatagcaatatag

SEQ ID NO: 96617 - DNA, 894 bp, Klebsiella pneumoniae
atggaattatttgcaataacagataataccgttggcactcgcattgttaaaattgttactgacagaccaacgcaaaatgtaataactcagttattcaatgaacaaaaaacattttttgaagatcgctatactgaaggagtagagttttcaggtggatatatcacaagcggtgatgagttctttgtaattcctgattttgatgatgttatagctgtattggatgcaattaataaccccacagcaattcccgaatgggaaccagaagatatctctgtattcaatattatcgctcttttttcaggttatcctgaagagaatgaaaaacctgcaatcgccttgattcaaagcttcgataaaagacaagtcattgataatagaagaacaatctttcataaaccttttcaagcaggtaataccttctgtcagtctgctgagcatggcatcgtcattgataataaactaacagccattctaacaggtacagaattgaaatttaaaagtttccatatgctgcgtaggatattcgatgtggatgcatatttccgagaagccacaaatgaagagttaacaactttttcttcccatgaaaaattttcagttgctcagggatttgatttaacgactattgctgattcagtcattagaaagaaagtttccttgattaacaaatcaagaatacttgaggactactctgtcactgagttaaggatttcagcagctgaaattggtgtcgttttagatactgaaaatgctggcgaatttgagaaaataaaaatgccacaaataaggaaagacgttaaaagattattgcacttcctagatgaagactatttcacctcacatataacaagaacgctgtatcgagcaaactctaaacgtcgagaagatgtataa

SEQ ID NO: 96618 - DNA, 516 bp, Klebsiella pneumoniae; identical to SEQ ID NO: 96616

SEQ ID NO: 96619 - DNA, 894 bp, Klebsiella pneumoniae; identical to SEQ ID NO: 96617

SEQ ID NO: 96620 - DNA, 519 bp, Enterobacter sp. GN02825; identical to SEQ ID NO: 96026

SEQ ID NO: 96621 - DNA, 885 bp, Enterobacter sp. GN02825; identical to SEQ ID NO: 96027

SEQ ID NO: 96622 - DNA, 603 bp, Enterobacter cloacae; identical to SEQ ID NO: 96302

SEQ ID NO: 96623 - DNA, 942 bp, Enterobacter cloacae
atggataagaaagacttagatgacaatctgagttattatataaataataaagatgatgtttctgtaattatttacgctattcttaaaagcagccctgacgcatatcgtatggatatcgaagcgagcgctcaggatagcttaaaagagttatttttagatagtattaagaataatataattgatgatggcgatcttagtgttttgcctctatcgtcagcggatgaaagaaataatgttatttatcaatatgatataggatggcctgatgagttaacctctatgcaaaatatgcttggacaaccaggtgaagccgtttttgatttcaaaacacaacaaatagaagatatcagagtattgctagtttgcattggtaatgcagatcagcaaattgtactctacaaaaccatggctccagttaatattttctctcgtactggtttttttctaaaaaaatcagctacaagacttgaagaaattaaggatgacttcttcagggtaagtgataacttccaaattattaaagtagaaaatgatttatatgtagtggatcttaaattaatcgaaaaaatgtttggttttcatgaggttattaaaaaagaagccactcttggcatgactgccattgaagggatgaatattatcactgatatagaggtgataaaagagttaatagatgatataaaatatgcgcgaaagttaacaagaatagcaaaatcttctccagttatattagccaagattgaaaatgaaaaaattattgagttttgtaagacctatcctgtattaatcaacagaataagatttaacgaagatggtacaaaaatcgcccttgatactaaagtttcaaaagatctgtttattaaaatattgatggatgactttttaacttcgcaactgactcagttctattatgaaagccttgcaaaggatgcggtaaagtag

SEQ ID NO: 96624 - DNA, 588 bp, Enterobacter cloacae
atgcaaaggaacacatacaacaaagtaggtctatacatcctatctctagctatgctttttgtttttattattatcctgactgccaaaatccccttttgcttcacttcggattgtagcttcataggtttgaagaaacttgtattaacaaatattgttcctattgtttgctttgtattttttctatttagtatttatttttataatagattaaaaaacataacaaaatacaatggacaagatagcgttaaaataacatcatgtcaaagcgaaagctatgaaagtttaacattcttagcaacatacattgtaccttttatggggtttagttttgaagacatgcaaaagaatatagcatatcttttgcttgtagtagtaataggcattatttttattaaaacagacaagtattatgcgaatccaactttagctctgtttggctttaaactatacagggtaaatatactacacccaggaagtggagaaacaaaaaatctgatagctatttcaaatgatgtattaaaagtggacgataatgtttattatagtttctttgatgaatttgtttttatagcaaggaaaaaaatatga

SEQ ID NO: 96625 - DNA, 948 bp, Enterobacter cloacae; identical to SEQ ID NO: 95735

SEQ ID NO: 96626 - DNA, 612 bp, Listeria monocytogenes; identical to SEQ ID NO: 96206

SEQ ID NO: 96627 - DNA, 942 bp, Listeria monocytogenes; identical to SEQ ID NO: 96207

SEQ ID NO: 96628 - DNA, 273 bp, Salmonella enterica subsp. enterica serovar Typhimurium; identical to SEQ ID NO: 95978

SEQ ID NO: 96629 - DNA, 978 bp, Salmonella enterica subsp. enterica serovar Typhimurium; identical to SEQ ID NO: 95651

SEQ ID NO: 96630 - DNA, 594 bp, Salmonella enterica subsp. enterica serovar Typhimurium
atgaaaaaaagaacaggtttaaagtatgcattatatatattgtcactatggctattgtttgtatcactttttataatgtcatatgacaagaatctttttgtaagtatatcaacatatctggacagcaaagatacaggaacattactttcaagcatcacgcctaaaaatatagtttttatttccagttttgcaatgatagtagcaggtgttttttttctatatttattactttcctttaactctggttggtcggtagcgtgcacggtttctgatgttagaaatgaaagtcatgagcatcttgaatttttaactacctatgttatgcctttggtatttactgatgtgaacagcaagaggactatgctgaatcttttgatcatgatagtagctatagggatgatttatgtaaaaacaaatcgtttttattctaatccatcgttagcattgcttggatttagaattttcaaagctaatataaatgatagaggaaccaaagaatttgtaatcatttgccatggcgaaattgataacaacagcagaataaaatatatcaaactagataacaatacatgtcttgctaaaatcactcaataa

SEQ ID NO: 96631 - DNA, 978 bp, Salmonella enterica subsp. enterica serovar Typhimurium; identical to SEQ ID NO: 95651

SEQ ID NO: 96632 - DNA, 531 bp, Pasteurella multocida subsp. multocida
atgttaagttggcttgccaagtacttattttctgccagctccgctgcaccagtatgcattacgtttgccgtaatggcgtggtttaaaggagaattggcattaacatggatgatgatttcgtttgctttaattattacttttttatttctatatgtttttattcatattaaaaatgaactatcgcaaacaacattaagtattaactcagtgtcatctgcaaataaagagataactaattactttttagcatacttattcccgataattggtgctgatagcataatttcagactggagaattgctatatttttctatttatgctttttcttctatctgtctttttcatcatcatatcattttaatcctttgttatttttaatgggttataaaatatatgaggcaacagatcctactgggcgaggaatagttatcttatctaaagaggaaataaggaaaggtaatttaaaaaatatggttgtaaaagaaattacaccttatatgtatctgatagagaaaattaactatgaatag

SEQ ID NO: 96633 - DNA, 888 bp, Pasteurella multocida subsp. multocida
atgaatagctattttgcaattataaaacaaggctttagccctagaatagtttcattggcaatcgatataaacgcacaaaatgttttaaattctgagtttaaacgctgtaaagatgacttcaataatgtagagccagaggagtactatacaggatatcaatctgaagataattccgaattgttctatattgataaattcaatttaaatatcaatgtgtttgatgctttagaaaatccaacaaatcaaaaagttttcgatataaatgaaattggaattgagaatattatagcaatttttacaagtggaaattcacatgaagagtgcttagtccaatattataattcaaataatttcattaaaatgtcaaaaactgtatttatgacagataaaaaaaaagaaatgactgctggttatattaatggtttttctatagcaaacaaattagtagctgttctacgtaagaagaatgataatatcagaattatttttagaagttttgatcttgctcgaagaatatttactacgttagatgattattttaaagaagcaacagatgaggagctgaaatctttcatatcttctcattttgatgcagatccaaattttaatattcttgaaatagccaataaaaatacaagaaataaagtaactcaacttaacaagcataaagtcttggacaataaaacagcagatgaaatcaagcaaatggcaagtaaattcgagtttgagttaaatattaatccccaatctaaaaaggttttaattcctaataatattagagatattaatgaactactatctggattcgcttccttgatatatcaatctccaatcacaggtgaaagaatgaaagcaaatgctgcaagaccatatcccaagaaaaaataa

SEQ ID NO: 96634 - DNA, 531 bp, Pasteurella multocida subsp. multocida; identical to SEQ ID NO: 96632

SEQ ID NO: 96635 - DNA, 888 bp, Pasteurella multocida subsp. multocida; identical to SEQ ID NO: 96633

SEQ ID NO: 96636 - DNA, 531 bp, Pasteurella multocida subsp. multocida; identical to SEQ ID NO: 96632

SEQ ID NO: 96637 - DNA, 888 bp, Pasteurella multocida subsp. multocida; identical to SEQ ID NO: 96633

SEQ ID NO: 96638 - DNA, 531 bp, Pasteurella multocida subsp. multocida; identical to SEQ ID NO: 96632

SEQ ID NO: 96639 - DNA, 888 bp, Pasteurella multocida subsp. multocida; identical to SEQ ID NO: 96633

SEQ ID NO: 96640 - DNA, 531 bp, Pasteurella multocida subsp. multocida; identical to SEQ ID NO: 96632

SEQ ID NO: 96641 - DNA, 888 bp, Pasteurella multocida subsp. multocida; identical to SEQ ID NO: 96633

SEQ ID NO: 96642 - DNA, 531 bp, Pasteurella multocida subsp. multocida; identical to SEQ ID NO: 96632

SEQ ID NO: 96643 - DNA, 888 bp, Pasteurella multocida subsp. multocida; identical to SEQ ID NO: 96633

SEQ ID NO: 96644 - DNA, 531 bp, Pasteurella multocida subsp. multocida; identical to SEQ ID NO: 96632

SEQ ID NO: 96645 - DNA, 888 bp, Pasteurella multocida subsp. multocida; identical to SEQ ID NO: 96633

SEQ ID NO: 96646 - DNA, 585 bp, Xanthomonas citri pv. citri; identical to SEQ ID NO: 95814

SEQ ID NO: 96647 - DNA, 930 bp, Xanthomonas citri pv. citri; identical to SEQ ID NO: 95555

SEQ ID NO: 96648 - DNA, 519 bp, Enterobacter cloacae
atgaatcgtttagcaaggctactacttactgcgagctccatcgctccagtttgtgtgacgttgattttcatagggtttatgaagcataacacatggcttatatacacaagtcttgttacggcggttgtaagttggatactttgtctgactttagtaactgtggccgaaaaaaaatttgaaattcttagcaagaatattgactccgtatcacctgcaaataaagaagtaactaattactttcttagctatctgttccctttacttgggacggattcaattgcaactgtaaaagagtatgctatattcttttatgtatcacttcttttatatatatctttttccgaaaactacaacttcaatcccgtgttagctttacatgggtataaattctatgaggctgaagatgatacgggtgtggggttcgtgttaatttccaaagagattatcacgaacatcaaggatataaattttaaagttgtcaaactgactgaacacacattcctacatgtaaaaggataa

SEQ ID NO: 96649 - DNA, 888 bp, Enterobacter cloacae
atgccgttatttgcaattatggataatcagagcgctataaaaatagtgagaatcaaactagatagagctgcctcgactatgattaacgaaacatttaatcagcaaagacaatactttgaagcgcatcatgactcagttataccattttatgctggatataaccctagttacaatgaaagctttgaattagagaatttccatgattctaatttactaatggatgcagtaaggagaaacactgcaattcccgagtggaaacctgaagaaataaatatagaccacattaagggtttgtttgtaggtgttggtgaaccgaatgcggaaaactgcattgccttacaaacctttaataaaaagcaaatcctagatacatctaaatcatttgtaatgtccctggttggggcggcaaatacttttagcaaagctgaaaaggttggctttaatatagacgataaattagtcgcaattattaaaaatgacaagatccatttccgaagctttttcaaacttcgcagtatctttgacatgacagtttactttcaagaggctacagaccaagatcttgcattattttccagtaacgccgcgttttctatacccgagggtcttgatttgagcgttattgccgataccccaataagaaacaaaataacattaataaataaaagtgggattttagacgctgaattactacccgttttgaaatctgcagcagaaaaaattggattccctctaaaaatcaacaatgtcgagggccaagaaagaattgaaatgccccaaacaaagagagaaattaaagctctattggattttttggatgaggatatttttacctcagaaattagccaaaaggtctttaagagcaattcgaaaagaccttatgcatga

SEQ ID NO: 96650 - DNA, 573 bp, Enterobacter aerogenes; identical to SEQ ID NO: 96078

SEQ ID NO: 96651 - DNA, 894 bp, Enterobacter aerogenes; identical to SEQ ID NO: 96079

SEQ ID NO: 96652 - DNA, 594 bp, Serratia marcescens; identical to SEQ ID NO: 95974

SEQ ID NO: 96653 - DNA, 972 bp, Serratia marcescens; identical to SEQ ID NO: 95975

SEQ ID NO: 96654 - DNA, 615 bp, Escherichia coli; identical to SEQ ID NO: 95636

SEQ ID NO: 96655 - DNA, 1023 bp, Escherichia coli; identical to SEQ ID NO: 95949

SEQ ID NO: 96656 - DNA, 522 bp, Klebsiella pneumoniae
atgaacaaaattgcaaggtttcttttaacagcaagttcgatagctcctgtaggtatcacgctgatatttataggatatatgaaaaacaagccatggcttatttggtggtcgttagggatctgtcttgctagttttatatcagttatttttttcctacactatgcaaataaaaacctcccttctctttataagaatgttgagaccatatctcctgcaaataaagaggttaccaattatttcttaagttatctattccctttattagggacagattcaatcgccgataaatggcaatatgcagtatttttctatatatctcttatcgtttatatatgtttctctgagaactataatttcaaccctcttatctccgctttaggatttaaattttatgaagcagaagacgatactggcgttggatttgtgttgatatccaaagaagttattacaaatttaaaaaacagagattttgaagttattcaacttacagactacacatttatgcatgtaacaaggaaataa

SEQ ID NO: 96657 - DNA, 870 bp, Klebsiella pneumoniae
atgagcctttttgcaatgatgaataaaaactctgctgtgaaagtgtatcgtattgataccgacagacaaacagacatcaaaatcaaaaaaatatttgatgaccaattatctctttttgaaagtcatcacaatacggaacttgttttcgaagccggatatacccctagctataatgaatgtagttatatagataactttgatgaaggaaaaatacttcttgatgcagttcagcgtagcaccgcaatgcctttgtggacaaaaaatgttgggcttaatgatataacagctttttttatggctcctgcgtatcctcaagtgaaagacaaaatagcaatccaaaccttttcaaaaaaacagatacttaacgagtcaagatacttatggctcagtaaaaattcatttacgatgtcagatcttttgggtttcaatctagacgataaattagttgcaatccttgaaggagataaaataaagttcaggaactttaacaacctgagaagcatatttgatatgagtccttattttgctgaagcaacaaagcaagagatttctgactttgtaaaccaaccagtttttaatataccagtggggtttgatcttccagcccttgcagataacgtcataagaaaaaaagtcacattaataaacaaatctaaaatattggtaaatcatactgtaaccgaaataaaaaacgcagcgctaactttgaacttccctataaaaacgaccggctcaggaagctccgagaaaatagaaatgccaacaaataaaaaagaaataaaagagttacttaacttcttggatgaagactatttcaactctgaaataactaagcaaaggtttcgatcaaattcaaaacgtaaagcataa

SEQ ID NO: 96658 - DNA, 588 bp, Escherichia coli; identical to SEQ ID NO: 95656

SEQ ID NO: 96659 - DNA, 960 bp, Escherichia coli; identical to SEQ ID NO: 95657

SEQ ID NO: 96660 - DNA, 594 bp, Klebsiella pneumoniae; identical to SEQ ID NO: 95890

SEQ ID NO: 96661 - DNA, 972 bp, Klebsiella pneumoniae; identical to SEQ ID NO: 95891

SEQ ID NO: 96662 - DNA, 573 bp, Klebsiella pneumoniae
atgaccacggacttcatgtatactggttttttatacagttatggtgggtggtgtatgcttaatggatttgctcgctatgctttgactgctagttcggttgccccagtttgcctgacattggcattcttagcttatattaatgataattataagattcttgtttcctcaattcttttggctgtcgtaagtgtggttttttgtgtctttataatcaaacaagcacaaaaatataatccggtcacattgaaaaacttagaatcggcatctccggcagataaggaaataaccaactatttcttgacttacttatttccacttatatctgggccgaccacttttatggattggcgattagctctatttttttatttaagtcttttcttctacataaaacactcgtcttcgtatagtttcaatccaattttgtctattatatttggattcaagttctatgaagccgaagatgacaccggggtgagctttgttcttttgtcaacaaaacctcttaccaatgcgaagatcaaaggtttgagggtaaagaagcttactgaacatacctatatgattgtataa

SEQ ID NO: 96663 - DNA, 865 bp, Klebsiella pneumoniae
atggaactttttgcgattacagacagcgagataccgactagaataattaagattgacatagatgctcccgcacaaacggtagtagaaaatctatttagaactcagagaagtgagtttataaatgaagatatcgaagagatagacttttgtgcatcttataatgttcaggatggtgaaatattttctatcaatccatttgatgacgaaataggcattattaatgcaatcgaacggcctgatgctgttccggtttgggaccctgatgatgtgtcagttcattattttaaagcgttatttacgggtgagccagcttcgaatggtaatcctactcaggtttggcttcaatgtttcgacagacgacaaataattaataatgaaaaatcctttttccaagtagtaactcagcctggaaatagattctcagtgtccactcgtcctggtttttcgcttagtgatcgattaactgctattcttgtgggtgataaattattgttcaagagtttctttatgctccggcgattttttaacatggaagagtattttaatgaagctactagagaggatttagataactttatcggtaatgatatatttcatgtggaaaatgctgaagattttatgacgtttgcagattctgcaattaaaaagaaagtatctttgataataagttctggaatactcaacgatcagcctattgaaaatctaattgagtgtgcccagaagattggatatcaattaggtataactaatgtgaatggtgacaataaaatcactatgccaaactctaaaagagaagtgaagcaactattatatttcctcgatcagggctacttcaattcaataatcacaaatgagttaatgttga

SEQ ID NO: 96664 - DNA, 519 bp, Klebsiella pneumoniae
atgaacaaaattgcaaggtttcttttaacagcaagttcgatagctcctgtaggtatcacgctgatatttataggatatatgaaaaacaagccatggcttatttggtggtcgttagggatctgtcttgctagttttatatcagttatttttttcctacactatgcaaataaaaacctcccttctctttataagaatgttgagaccatatctcctgcaaataaagaggttaccaattatttcttgagttatctattccctttattagggacagattcaatcgccgataaatggcaatatgcagtatttttctatatatctcttatcgtttatatatgtttctctgagaactataatttcaaccctcttatctccgctttaggatttaaattttatgaagcagaagacgatactggcgttggatttgtgttgatatccaaagaagttattacaaatttaaaaaacagagattttgaagttattcaacttacagactacacatttatgcatgtaacaaggtaa

SEQ ID NO: 96665 - DNA, 855 bp, Klebsiella pneumoniae
atgatgaataaaaactctgctgtgaaagtgtatcgtattgataccgacagacaaacagacatcaaaatcaaaaaaatatttgatgaccaattatctctttttgaaagtcatcacaatacggaacttgttttcgaagccggatatacccctagctataatgaatgtagttatatagataactttgatgaaggaaaaatacttcttgatgcagttcagcgtagcaccgcaatgcctttgtggacaaaaaatgttgggcttaatgatataacagctttttttatggctcctgcgtatcctcaagtgaaagacaaaatagcaatccaaaccttttcaaaaaaacagatacttaacgagtcaagatacttatggctcagtaaaaattcatttacgatgtcagatcttttgggtttcaatctagacgataaattagttgcaatccttgaaggagataaaataaagttcaggaacttcaacaacctgagaagcatatttgacatgagttcttattttgctgaagcaacaaagcaagagatttctgactttgtaaaccaaccagtttttaatataccagtggggtttgatcttccagcccttgcagataacgtcataagaaaaaaagtcacattaataaacaaatctaaaatattggtaaatcatactgtaaccgaaataaaaaacgcagcgctaactttgaacttccctataaaaacgaccggctcaggaagctccgagaaaatagaaatgccaacaaataaaaaagaaataaaagagttacttaacttcttggatgaagactatttcaactctgaaataactaagcaaaggtttcgatcaaattcaaaacgtaaagcataa

SEQ ID NO: 96666 - DNA, 519 bp, Klebsiella pneumoniae; identical to SEQ ID NO: 96664

SEQ ID NO: 96667 - DNA, 855 bp, Klebsiella pneumoniae; identical to SEQ ID NO: 96665

SEQ ID NO: 96668 - DNA, 519 bp, Klebsiella pneumoniae; identical to SEQ ID NO: 96664

SEQ ID NO: 96669 - DNA, 855 bp, Klebsiella pneumoniae; identical to SEQ ID NO: 96665

SEQ ID NO: 96670 - DNA, 513 bp, Klebsiella pneumoniae; identical to SEQ ID NO: 96000

SEQ ID NO: 96671 - DNA, 885 bp, Klebsiella pneumoniae; identical to SEQ ID NO: 96001

SEQ ID NO: 96672 - DNA, 594 bp, Serratia marcescens; identical to SEQ ID NO: 95974

SEQ ID NO: 96673 - DNA, 972 bp, Serratia marcescens; identical to SEQ ID NO: 95975

SEQ ID NO: 96674 - DNA, 273 bp, Salmonella enterica subsp. enterica serovar Typhimurium; identical to SEQ ID NO: 95978

SEQ ID NO: 96675 - DNA, 978 bp, Salmonella enterica subsp. enterica serovar Typhimurium; identical to SEQ ID NO: 95651

SEQ ID NO: 96676 - DNA, 597 bp, Salmonella enterica subsp. enterica serovar Typhimurium; identical to SEQ ID NO: 95980

SEQ ID NO: 96677 - DNA, 978 bp, Salmonella enterica subsp. enterica serovar Typhimurium; identical to SEQ ID NO: 95651

SEQ ID NO: 96678 - DNA, 273 bp, Salmonella enterica subsp. enterica serovar Typhimurium; identical to SEQ ID NO: 95978

SEQ ID NO: 96679 - DNA, 978 bp, Salmonella enterica subsp. enterica serovar Typhimurium; identical to SEQ ID NO: 95651

SEQ ID NO: 96680 - DNA, 603 bp, Citrobacter sp. MGH106
atgaaaaatgattcaaaagaaacaaaggagtatgttaggcgtaaaattgatttatatattctatcgctggctattttattctgttttttcatttttattacattgaaattccctgtgtgttttggtgctaaatgtgagtttatcggctggtctttgttattgaagaataatgttgttcccttggtatgtcttggattgctcatttattgttggattgcctaccgtagatttaaatatgatactaataagactgtagagctcccattaaaaataataaagatagaaaaaataaattacgagcatctaacttttttagctacatatattattccgttaattacctttgattttgaaaaagagagatatgttatcgttctggcagttctcttaataatcatgggggtgatttatattaaaacggatttgttttatgccaatccttccttggctttattggggtttaatatttataagttggacgttagtataactggaggtattaataaaacagggttgatattaattactaggcgacaattgaaagaaaatgacatggtaagttatattgtgcttgatgaaagagtttactattctggagattaa

SEQ ID NO: 96681 - DNA, 957 bp, Citrobacter sp. MGH106
atgtcaccacagcaaatggataagaaagacttagatgacaatctgagttattatataaataataaagatgatgtttctgtaattatttacgctattcttaaaagcagccctgacgcatatcgtatggatatcgaagcgagcgctcaggatagcttaaaagagttatttttagatagtattaagaataatatcattgatgatggcgatcttagtgttttgcctctatcgtcagcggatgaaagaaataatgttatttatcaatatgatatagggtggcctgatgagttaacctctatgcaaaatatgcttggacaaccaggtgaagccgtttttgatttcaaaacacaacaaatagaagatatcagagtattgctagtttgcattggtaatgcagatcagcaaattgtactctacaaaaccatggctccagttaatattttctctcgtactggtttttttctaaaaaaatcagctacaagacttgaagaaattaaggatgacttcttcagggtaagtgataacttccaaattattaaagtagaaaatgatttatatgtagtggatcttaaattaatcgaaaaaatgtttggttttcatgaggttattaaaaaagaagccactcttggcatgactgccattgaagggatgaatattatcactgatatagaggtgataaaagagttaatagatgatataaaatatgcgcgaaagttaactagaatagcaaaatcttctccagttatattagccaagattgaaaatgaaaaaattattgagttttgtaagacctatcctgtattgatcaacagaataagatttaacgaagatggtacaaaaatcgcccttgatactaaagtttcaaaagatctgtttattaaaatattgatggatgactttttaacttcgcaactgactcagttctattatgaaagccttgcaaaggatgctgtaaagtag

SEQ ID NO: 96682 - DNA, 516 bp, Citrobacter sp. BIDMC107
atgctgagctttatcgcaaaatatatacttacagccagcgctgttgcccctgtatgcattacgctatcatttgttgcttggcttaacggaagcaaggtttattgtttttttagtcttagtctggcaattttaagttttttgctatgctggttgacattacatatcgctaagaaaagagtaagcgaaacccatgttaacttaacatctcttactcctgcaaataaggagatcactaattatttcctagcatatttattccctctaattactgatgataaactgattgaaaatatttggttggcagtgtttttctatatcagtttatttgtttatataggtttttctggtagttactcttttaatcccatcttatctttcttagggtataaattttatgaggcagaagatgatacaaatgtttcttttgttttaatatctaagaaggcattgcaaaaaggtaatgttaaaggattaaaggttgtacagcttactgatcatacattcataaaggtttaa

SEQ ID NO: 96683 - DNA, 873 bp, Citrobacter sp. BIDMC107
atggaactatttgcccttacagaagatgatattactcctgatgttgttaaaatatgtttggacaaaaaaacgtcggacacagttaaccagattttcgagaaaatgatagcagcattttatgaaacatctcctgacccgatggattactctgccgactataagcttgataaaaatgaacattttatcatacctggctttaagcaacatataccattaggagaagcccttatctctcctaaagcaattacagccttagatattaatgatattgggctagacaaaattaaagctctatttacaggttctacagatggtcagcgcatttacattcaaaagtttgataaaggacaagtgataacagctacaaatagttttttctttttcgataatacaaaaacattttcagcccctgagcacaacggtttaactattgggccaaaattaacagcaataatagacagtaacatattattattcagaaatttcaataacctcagacgtatattcaatatggatgaatattatcgatccgctactgatagtgaactcgatgcgtttcaagaaagtgatgtatttcattgtgaaaatgggttcaaactttctgattttgacgatactgttatacgcaggaaggttactttacttaacatgtctggcgttttaaaagaacatacaatagcgaccttgcaagaagctgcaagtgtgttaaatcatccactagatattatgcgttttgaagaaaaagacaaaataaaactcccaaacaacaaaagagatataaaattattacttagcttccttgactcagatatctatatatcagcaataaatggtgttaagtatcgctctaactccaagacacggattatttag

SEQ ID NO: 96684 - DNA, 597 bp, Salmonella enterica subsp. enterica serovar Typhimurium; identical to SEQ ID NO: 95980

SEQ ID NO: 96685 - DNA, 978 bp, Salmonella enterica subsp. enterica serovar Typhimurium; identical to SEQ ID NO: 95651

SEQ ID NO: 96686 - DNA, 273 bp, Salmonella enterica subsp. enterica serovar Typhimurium; identical to SEQ ID NO: 95978

SEQ ID NO: 96687 - DNA, 978 bp, Salmonella enterica subsp. enterica serovar Typhimurium; identical to SEQ ID NO: 95651

SEQ ID NO: 96688 - DNA, 273 bp, Salmonella enterica subsp. enterica serovar Typhimurium; identical to SEQ ID NO: 95978

SEQ ID NO: 96689 - DNA, 978 bp, Salmonella enterica subsp. enterica serovar Typhimurium; identical to SEQ ID NO: 95651

SEQ ID NO: 96690 - DNA, 273 bp, Salmonella enterica subsp. enterica serovar Typhimurium; identical to SEQ ID NO: 95978

SEQ ID NO: 96691 - DNA, 978 bp, Salmonella enterica subsp. enterica serovar Typhimurium; identical to SEQ ID NO: 95651

SEQ ID NO: 96692 - DNA, 597 bp, Salmonella enterica subsp. enterica serovar Typhimurium; identical to SEQ ID NO: 95980

SEQ ID NO: 96693 - DNA, 978 bp, Salmonella enterica subsp. enterica serovar Typhimurium; identical to SEQ ID NO: 95651

SEQ ID NO: 96694 - DNA, 597 bp, Salmonella enterica subsp. enterica serovar Typhimurium; identical to SEQ ID NO: 95980

SEQ ID NO: 96695 - DNA, 978 bp, Salmonella enterica subsp. enterica serovar Typhimurium; identical to SEQ ID NO: 95651

SEQ ID NO: 96696 - DNA, 519 bp, Leclercia adecarboxylata; identical to SEQ ID NO: 95794

SEQ ID NO: 96697 - DNA, 894 bp, Leclercia adecarboxylata
atggaactttttgcgattacagacagcgaaataccgactagaataattaagattgacatagatgctcccgcacaaacggtagtagaaaatctatttagaactcagaggagtgagtttataaatgaagatatcgaagaaatagagttttgtgcatcttataatgttcaggatggtgagatattttccatcaatccatttgatgacgaaataggcattattaatgcaatcgaacggcctgatgctgttccggtttgggaccccgatgatgtgtcagttcattatttcaaagcgttatttacgggtgagccagcttcgaatggtaatcctactcaagtttggcttcaatgtttcgacagacgacaaataattaataatgaaaaatcctttttccaagtagtaactcagcctggaaatagattctcagtgtccactcgtcctggtttttcgcttagtgatcgattaactgctattcttgtgggtgataaattattgttcaagagtttctttatgctccggcgattttttaacatggaagagtattttaatgaagctactagagaggatttagataactttatcggtaatgatatatttcatgtggaaaatgctgaagattttatgatgtttgcagattctgcaattaaaaagaaagtatctttgataataagttctggaatactcaacgatcagcctattgaaaatctaattgagtgtgcccagaagattggatatcaattaggtataactaatgtgaatggtgacaataaaatcactatgccaaactccaaaagagaagtgaagcaactattatatttcctcgatcagggctacttcaattcaataatcacaaatgagttaatgttgacgaattcgaagcgaccaataagaatttga

SEQ ID NO: 96698 - DNA, 597 bp, Salmonella enterica subsp. enterica serovar Typhimurium; identical to SEQ ID NO: 95980

SEQ ID NO: 96699 - DNA, 978 bp, Salmonella enterica subsp. enterica serovar Typhimurium; identical to SEQ ID NO: 95651

SEQ ID NO: 96700 - DNA, 519 bp, Leclercia sp. LK8; identical to SEQ ID NO: 95794

SEQ ID NO: 96701 - DNA, 894 bp, Leclercia sp. LK8; identical to SEQ ID NO: 96697

SEQ ID NO: 96702 - DNA, 591 bp, Chryseobacterium koreense CCUG 49689; identical to SEQ ID NO: 95588

SEQ ID NO: 96703 - DNA, 1020 bp, Chryseobacterium koreense CCUG 49689; identical to SEQ ID NO: 95589

SEQ ID NO: 96704 - DNA, 597 bp, Vibrio crassostreae
atgaagcttaaagacgaaattaagctttacattctatctttagccgttttgttttttatcgtattgctcataacattcagagctgacgtttcccccgataactatgtcgaaataatgagttattgggactggacggttttatggctcacctctaactggctccctactctgatgatcgcttcgatgctgtattgcgaggtgattcgtagagaatttgagcataaattagatggcggagctggtgatagtttgtatattacagattgcaaaagcgaaaactatgaacaacttacctttttagcgacttacattattccgttttttggtttcagctttactgaacctggacggttgctagcctatggtgttttgttgttcgtcatcggaatgatatttgttaaaacagataaatattacgcgaacccaacccttgcactttttggctataagctatatcgcgtaactatggcagatgctcaacaacgttatgaatctgtaatagttatcacgaaaagcgacttgaataacaaccagagcgttaactataagttattgtctcataacgtcttttttgtaaggaaagtaagacttgaataa

SEQ ID NO: 96705 - DNA, 954 bp, Vibrio crassostreae
ttgaataacgctgaaattaaagcgaaccttggattgtttgcaacaaactgtactggtattgaaatctttattgtagatcaagaagataaccttacccgttcagacattcaaaatagcgccttagatggggctagaaatgcgtttacagatgctttgaagaaaaagtatatcgaaaatgaaagctttactatcccgtatctttctaatcatgacgatcgaaagcacgcgctatatcagtttgatttcgatgaaagtccccaagcatttgacttagtaaacactgcaatggttgcgactgctgaaactgaaatgcctacttacgaagctcgtgataacaaactagaaaacattaaagctttaattattgtccttaaaaaccgagatggccacaaagcgggattttatcaacacgtctatggagttactctcttaaagtcagggaaaggcattttaaatcttatggctcacgagacaagagttgttaagttgcaacaagatattctaagagtatcacctaattttatatttttaaaaatgggcgatgtatatttagtagaaagtgttaatggcttagagaatcagcttaacttcaaagatgtgattcaacgcaaagctgaagtattaacagaaacgctggttggaatgaacttttctgacgacttcaatatcttcattgagaaagtacaagaagacatttcgttcgctcgaaaggttgtaaaagtttgtactcattcagctgttctagaacaagaaattactactgcagagctaattgaattcgtaaaacaggaagagcattatgctaatgtcctgaagtttaatgacgacgaaacacaatttgatttgaatagtatcaatcgttgtagaaagtttttagaactattagatgacgatttacttcgctcgccacttacaaataaatcgtatatagctagatcaaaagaccgtgtctaa

SEQ ID NO: 96706 - DNA, 597 bp, Vibrio crassostreae; identical to SEQ ID NO: 96704

SEQ ID NO: 96707 - DNA, 954 bp, Vibrio crassostreae; identical to SEQ ID NO: 96705

SEQ ID NO: 96708 - DNA, 597 bp, Vibrio crassostreae; identical to SEQ ID NO: 96704

SEQ ID NO: 96709 - DNA, 954 bp, Vibrio crassostreae; identical to SEQ ID NO: 96705

SEQ ID NO: 96710 - DNA, 597 bp, Vibrio crassostreae; identical to SEQ ID NO: 96704

SEQ ID NO: 96711 - DNA, 954 bp, Vibrio crassostreae; identical to SEQ ID NO: 96705

SEQ ID NO: 96712 - DNA, 582 bp, Bordetella hinzii
atgacaaacgtgcaccggaaagtggacctttacatcctgtctcttgggctattgttcgtcttctttatcattattgcggcggagcctccagcttcttccttttctttcaaggatgccgggagctggaaagcacttgtggtgaacaaccctttgcccgtggtttcgatattggggctgatttactgcctgtttgcatacattcgctttgacttcgatttgaaaggcgctaacgagataccttttgaagtcaagaagctggaaaacatcaactatgagcacctaacatttcttgccacctatgtggtgccactcatcagcttcgattttggcaatggccgacaaatgattgtgctgacgttgctgctggtggtgatggggatcatctacatcaaaacggatctgttttacgccaacccgtctctggcacttcttgggtttcacatctaccgtgccagcggtcatttcaagaatggcgagcgggaaggcatcacactgatttgtcgtgaacggttggcggagaaccaaaaagtttcttacataaagctggatgatcgaatttattacgtcagggggataaaatga

SEQ ID NO: 96713 - DNA, 969 bp, Bordetella hinzii
atgattgccgaggaactgaaaacggccttgcaggcctactatagcgatcaggccaatatcggcgtttgtatgtatgcgctgatgaaggatgctgagaatcccggccccttcaagctggacattgaagccgatgcagaggctggactcaaggccttattcctgcaaagtctgcgggacgaaatttccagcaaagaggaactgtcggtccttgccttgtccagtgcggatgagcgagtcaatgccatatatatttacgatctcgacattcccgaggagctgacatcacttgaggctgttattgctcaagataatctgcccatgctggatttgaatgaaaaaagtctgtcttcgatcaaggcgctactcatcgaaatgggcaacgacatcggccagctggtcttgtacaagactatggcttccgtcaatatcttcggtcgatcgagtttctttctgcgcaagcatgaaagtcgacttgaacagctgaatgacgaatttctgcgcgtcagtgccgggtttcagatgttgcggattaacgatgctttgttggtgctgaatcttgaagcactggagcataacttcgggtttcacgacgtgatcaaaaaggaggccgcattgggcattgatgccattgtctcggcagcgttggtgaccaatccgaatgtcttgcgagagcttgtcgatgatgtgaaatatgctcgtcgcctcaccaagattgccaaggcttcccctgtacttaaagctggtatttcaggggaaagcgttgtccagttttgcaagacatttccccatctagttggtcgtgttcgatttaatgaagaaggcaataaagtggtccttgataccaaagtttcaaaggacttgttcatcaagatattaatggatgaattcctaacttctgaacttacacagttccattatgccagtgtcgcaaaagatgctgtagacccaagtgtggaggaggcaaattaa

SEQ ID NO: 96714 - DNA, 639 bp, Clostridium bolteae WAL-14578; identical to SEQ ID NO: 95876

SEQ ID NO: 96715 - DNA, 1029 bp, Clostridium bolteae WAL-14578; identical to SEQ ID NO: 95605

SEQ ID NO: 96716 - DNA, 636 bp, Yersinia enterocolitica; identical to SEQ ID NO: 95668

SEQ ID NO: 96717 - DNA, 1008 bp, Yersinia enterocolitica; identical to SEQ ID NO: 95669

SEQ ID NO: 96718 - DNA, 636 bp, Yersinia enterocolitica; identical to SEQ ID NO: 95668

SEQ ID NO: 96719 - DNA, 1008 bp, Yersinia enterocolitica; identical to SEQ ID NO: 95669

SEQ ID NO: 96720 - DNA, 636 bp, Yersinia enterocolitica; identical to SEQ ID NO: 95668

SEQ ID NO: 96721 - DNA, 1008 bp, Yersinia enterocolitica; identical to SEQ ID NO: 95669

SEQ ID NO: 96722 - DNA, 600 bp, Yersinia enterocolitica
atggctactaagaaaaaagattggagtgttataaaaaggaaggtggatttatatatattatccctttggcttttatttatttttttcataataataactgtgaaagtccccatttgttttggtgagcaatgtaaatttattggttggtgggaattaataactaataacataatcccaattatttctatgatgtttgttgtgtacggttttatcgcatacaagcgatttaaatatgatactaaagggtcggctgaaattccatttgaaattaaaaaggtggagagtataaattatgaacacttaacctttttggcaacatatgtaataccattaataacttttgattttgaaaaaccaagatatatatatgtcttagttttattacttgttgtaatggggattatttatataaaaactgacttattttatgcaaatccttcattagctcttttgggattccatatttataaggtagagggcgaatttaaagggggggagttaagggaagggatgatagtcatagctcgtaggcatttaaataaaggcgataaagttcgttacattaaactagatgatagagtttattattctgataactaa

SEQ ID NO: 96723 - DNA, 987 bp, Yersinia enterocolitica
atgccacaggatttaataactaaagatgatttggataaaaagttaagctattttatagataattttgatgatttaggcatagttgtttatgccatccttaaggattctccgatacccaaaaaaatggatattgagggtgatgctcaatcaggattaaaaaaactatttcttgataatattaagaataatattatcgaaaatgatgagttgaatattattcaactctcatcttcagatgagagaacaaaggttatatatcaatatgatttagatgtgcctgaggagcttagtgttattagctccgttttaactaacaaagaattcccagattttaatttcaaacaagatgtcgttgataatattaaagtgcttcttattgaaattggagataatgttgaacagatagtcctctataaaacaatggcatcagtaaatatatttaccagatcaagttttttccttaagaaatccaaaacaagatttgataaaataaatgaagactttttccgaataagtgatggattccagatcatgcagctttcatctggtctttttgttattaaccttgaaacaattgaaaagttatttggctttcatgaggtaattaaaagagaagcgactcagggaatggctgcaatagaagcaaaaaatattgtttctaatatggatgttttaaaagaacttatagacgatgtgaaatatgctagaaaactaactaaggttgcgaaagcctcaccagtattaaaggctgatattgaaaataataaaatcatacagttttgccaaatttatccatccctgaaagggcgaataagatttaatgaagataaaacacagatagttttagatacaaaggtatctaaagatttattcataaaacttttgatggatgattttttaacatcacagcttacggatttttattataacagtattgctaaggatactgttgatgtcgtagaacatgataatcaagatgtcgcataa

SEQ ID NO: 96724 - DNA, 516 bp, Yersinia frederiksenii
atgaacaaattcgcacggctattattaacagcaagctctattgcacctgtgtgtattacattagcttttattgggctagtgaaagatgctcggtggttggtttattcatccgtaacaatttgcttactaagttggttctcctgtatatttttcattcgatttgcaaaaagaaatcttgttgaactcaataaaaatatagattcaatttcgccagcaaataaagaggttacaaattacttcttgagctatttattcccgttacttggaactgaatctatatctagtgattggaaatatgctttatttttctatgcttcattattgttctatataagtttttctgaaaattacaatttcaaccctctactatctatgcttggttacaaattttatgaggccgaggatgatactggtgtaggttttgttcttatatcagaagacgtaataacagatgttagaaacaaagattttaaaacaataaaacttactgattatacgtatttacatattaaatag

SEQ ID NO: 96725 - DNA, 873 bp, Yersinia frederiksenii
atgccattattcgcagtcatggatagaaatacagctagtcgtataatgagaattgatactgataaagatactgaccaaaaattggttaagatgtttaatgaacaacatgcaaaatttgaatcacataatgatactgagatttcattttttgccggatataaacccagctatagtgaatgtttctatttagatgattttgcagaaacaaatgaactaattgatgcgataaaaagaagtaccgctgtacctgtatgggatccaaagactgttccaatggagcatattaaagcattatttgtggctgttgaaaatgccaaaaatggtaataaaattgcacttcagacgtttaataaaagtcaaattcttgatgtgtcaaaatcattatggttgagtaataatgttttcacaatgtcatcttctgtggggttcaatatagacgagaagctagttgccaccatacacggaaagaaaataaaattcaaaagcttacagaaactacgaagcatatttaacatggatatttatttctctgaggcaacaaacaaagacttaactgatttctgtgctcatgaagcatttaagcttgcagacggttttgatatgaatataattgcggacaccgtaatcagaacaaaaataactctaattaacaaatccaaaatacttgatgattatgatattggcactcttaaattagcagcagaaaaaataaaatttgacttacaaacatacaatgagaatggcgttgaaaaaatatcaatgccaagtacaaagaaagaagtaaaagcacttttaacatttcttgatgaagatatatttactgccgagattagtaaaaaagttttccgatcaaactcgaaaagaccatattaa

SEQ ID NO: 96726 - DNA, 636 bp, Yersinia enterocolitica; identical to SEQ ID NO: 95668

SEQ ID NO: 96727 - DNA, 1008 bp, Yersinia enterocolitica; identical to SEQ ID NO: 95669

SEQ ID NO: 96728 - DNA, 636 bp, Yersinia enterocolitica; identical to SEQ ID NO: 95668

SEQ ID NO: 96729 - DNA, 1008 bp, Yersinia enterocolitica; identical to SEQ ID NO: 95669

SEQ ID NO: 96730 - DNA, 327 bp, Methylophilus sp. TWE2
atgtttacctacaccattccttacatgatgtcgttttataaatttgaccttggcgactggaagctgctggtctgcctgtttattttcctggcactgttgttcgttttgtcttaccgcacgcaaaatgtatttgtaaacccggtgctggcactggcagggtatggattatatgattgccagttcaaagaaggggcgcaggaaaagcagggcctattattgtccaaagagcattttcaggtgggcgactattgcgcgatcaaacggctttcaaacttgatgtattttgtcacacaggtagaaaagaaaggaaatgacagtgacgactag

SEQ ID NO: 96731 - DNA, 942 bp, Methylophilus sp. TWE2
atgacagtgacgactagtgccaatcaaagcttgcagacactacgcggcactgatttcaaacattggctgaccacgttttggctggtgaaaaggaaattgagccagcaacaggccaaatactcggtatttaaagtcgatacggatgccaggctggagcagaaactcaagcatgccgtcaccgctaaaataagcgatcaaggctatcagctggatgcctatgactttctgaccgctgaccaggataatggcttattgaccatagagtccgctgccaccgatgtcaccttgatccaggccgagatcgataaaggcaccgccaatcccaaagtggagaaatatgaggatttgctcgattcctgggccatggtcatcaagctggagcaccaggataaagccttgtatgcctaccgtaaaatccataaattcaccaaccctgccaaactggcgcatgtttctttcctgcagtttaaggaccaggaactcaaggacctggatcagcaggagatttttacgattgatacgcaggtcgattttttcagctatgaaggcacgacttttatcgccaacaagaaagaattcgagagcacgctcaatttccgggctggcatggaaaaaaaccgcgatgtggtactacaggaatttgtggacctgaacatattcagcgatgccagtttgctcaaagagcatataggcaccaatttaaattacctgcgcaaagtctcctctatccagaaaagcggctattacaaagatgccaaatttcttgaggaactggtcaaagtcaatgcgcaaaaaggctggggcctggtcatagaaaacggggcgattgtcatcaacgaagcgtctatcgatctcgtcctcaccttactcaataacggccgcctggagtcacccatcaaccatgaaatgtttgatgcgccagtcaagaaaaaagtcacctag

SEQ ID NO: 96732 - DNA, 579 bp, Bacillus sp. FJAT-27997
atgatttcagtcctatttagaataggtttatatgtatcatcgttttttcctctatacgtcttactcatcattgataattatgaatattacagtacttggagggaatttaaaaatatattgttgtatgaaaattttcttccttctacatttagttatgtacttttgattttaattattctttcatttatttcactttatattattatgaaaataaggttaaatgaaaagcataaatttattggagtatgtaaaaccgaagataatttattgagttatgttgttacatacttagttccgatattgtctatagatataacaaaagctaatagtctattagtgaacctaggtttgttctcgttattaggatttatatatgtgaaaaatagtttagtttatttaaatccactttttttgttttttagatataatgtttttctgacagaaaataatgaggtcttaatatcagatttagatatatatgaactgaaaaatttagaaggagaaagaataaggacaagggtacttagttataaaatatatttagtgagaaagaaagattctttaccaacaaaccattaa

SEQ ID NO: 96733 - DNA, 933 bp, Bacillus sp. FJAT-27997
gtggagggaggtataaaaatgaatgtaacagatttagtaaacatacttaacggattagatgatcaagatttagatatgaggttgtatttcacaagaaaaaaacctaacggtaaatatcaatcttattcaccaacaatagatccagatctacaaaaagaaataaaggatattgtaaaattggctgtagaaaaagtacaaaatgtcgaacagcgtccatttagtccaattggtacaatagaaggatgcatagaaacctacgctccaaacgaagtgacaagttttaatgatatacttgaaagcatgagtgaagactttgtaagtcgtaaagaaattccacctgaagaaattagtaaattaactttttattgtctaaaaatatacactgaagaaggagatatcttattctttagaagggttaccaagtttaatcggttaaaaggcggtttttttgggaaatttactaatggagattttatgaaattagatggcactttgctcgggatagacccaaatgtagacattgttattcttggtgaagaaatgttgattttaaatcacatttcattagaaagaatattctctatccaagatcaataccatgaaaaagcaagtcaaacacttgaccttgtgagaagaacaaaccgaattacaaattatgaacaatttcgggaagattgtttgtcagatggaagagttacaagagccttaactaaattgctcaatgaagaagatagtatgcaccaagtatttgaaaattttgaaaatgttattcaagttattgatatatttggattaaatatagaaatagcagaagaaaatacaaaattagtctacgaagacaaatctcagctgttagatattacaagacttatgagggattctttttataggtcatggattaataaccgagatggatttgatgaaggagtttaa

SEQ ID NO: 96734 - DNA, 576 bp, Leuconostoc mesenteroides subsp. cremoris
atgaaaaaaatatataagtttgttgtcaaatcttctatgttcatctgttcgtattttccactttatttactattaataatttctaactatgattatatttttagaatcaaaccaaaggataaaatcgatggtctatatttggtaatttgttttgtcctaatttttttcattattatttctatttttgtttctagtattagtttgggatctaaaccaaatgtacgcaccttaacgattgaacaagtaaaaaggccaacagatacaattattagctatgttgcaacctatattttaccaatgactactattgaatttggtaagaatttttcgaacttaatgatgaacgttatgtttttctgttttatcggattattgtacactaaacttggattaatttatatgaacccgatttttgttttatttaattttaaaccttatgatgcaaaaggtaagattatattttctaatttaccatacgaaaaaatttcacaaaaaggtattacttggaatgcaacctcaataggaggatttgtttatgtagtacgaaaaaaatataatgaaaagtcattaaaataa

SEQ ID NO: 96735 - DNA, 924 bp, Leuconostoc mesenteroides subsp. cremoris
atggaattaacagaattacaagattttcttgcacatccagatacagatatgagtttgttttttacaagaaaagtatcaaacaatttaaattttatttcttacagatctgcagttggcgataacattcgcgatactttgatggatttatttgtaaattacgttaacagtctgattttggaaaatgctgaagtagaggaatataaccctacgggtgttgcggacggaacatatgaaacggttaatacgtccgaaatttcgtgttacagccaatatgaagatagtcttgctgatgctaataataatgaagatcttgaagacgaagcagacaacttaaatttttatactgttattttgaccaatcatactctgcatcaaagttataaactaattaggagggttacaaaatttaagagactctattctaagggtgttgttgccttctttagagggcaagaactaaatagaattgatgcaaagatgattggtcttgacggtcaaattgatattattcagcatgataatgaattgttattattgaatcatatagctattgaacgtgttttcttcatggatgaaacttttaattcaaaagctactgaaatgttaactctgatcaaaacaggaggatatatcacaaattttgacgattttgaagaagcttgtctaagtgacaaacgaatacaaaagacaattacaaaaatggcaaatgaagacataaattgggagaatgccttaaacaactttgatgaggtaataaccacaattgacatgtttgatttgaacattgagtataaccagattccgaagaacacgcttatttttgaatcaaaaaaccaggtaatgccaatacttaatttagtcagagattcgtattacaggacattaattaataatcatttaggaactgacaaaagaattggttga

SEQ ID NO: 96736 - DNA, 597 bp, Salmonella enterica subsp. enterica serovar Typhimurium; identical to SEQ ID NO: 95980

SEQ ID NO: 96737 - DNA, 647 bp, Salmonella enterica subsp. enterica serovar Typhimurium
atgttcacagcaatagataatatattaaatccaacccaactctccggtgaggcttattttgttgcagaacaccaagggcaactagatattttcagagtagctctagaaccaggtgcagaacagaaattaacacagtctttcagtcgatcacttaagcgtgatgttgttgacccaaacactggacagaacaccttgccgttagtttcttctctgctaagtcgagataagcaggtgcatgaatatgatcaccaagtaataaactatcttccacctgctctagcaaagatggcggacgtgcttagctttggagttaataatacacccactgactttgactttgcccagcaaaacctatcaaccgtgaaaggaatagtttattatctttgtgatggtcaaggtaacggagttgttgtttaccaacacaaatatccaatcgcactacataaaaaaacaaaattgtcatatttctctgcgaatggtagaacccttgatgaggtcacccatgatagcattgacataaatgggaatgtggatttcttttactttgacaacaagtattatgcactaaatatcaacttacttgaaagagcatatggccttgaacaagtcataaataatttagcggcaaatgcaacccctcatataat

SEQ ID NO: 96738 - DNA, 591 bp, Yersinia frederiksenii
atgaaccccaggttactatttgcttttgcaatattcctaggatcatatttacctttaagtactattttactggtacaagatatagatgataagaaaaaaaatggtcgtctttgctgggatttccttacatctgctacatgtagtatcccacttcagaagccatttctttcaatcggtttttttcttgtctgtttgacgtgtcttttagtatcttgggttgcattaaaatttgctggttctgaggggcgaaagataaaaattatagattctaagtactgtccttctgatctaatgaattatgttcttccttatattgtttcatttatgagtatagattacttacaagctaacaagtttttggggttcattatatttctcctctggcttttttggttgtcatataaatctgggcagataatattgaacccaatgcttatggtatttaactggaaaatgtatgaagttacgtatcgttttccaggaagtcaggatgtattttctggcgttgttttatccaatctaagtattgagccgaactctgactatgagtacgaaactgtacagtctgtcattgtaattgataaaggatga

SEQ ID NO: 96739 - DNA, 912 bp, Yersinia frederiksenii
atgcttgaaacacttaaggattttaatcttcaagaagcagaactatcagtttgggtttttaagaagaggacttctgaagggaatccaatattcacagggaaatggattactgttgatcaaatgttgaagcaagaacttataggctttatcgatgatgagagagaaaactatactgaagtggttaattattctttattagctcaaaataatgaaaatagtcttatgcatataggtacgggagaaacgtcagcggtatcagtggctgttgtctctgcgaaccaaacaccagaaaagaaagtcactgatattaaagagctttctaactgtgagttctattctgtaaaattagttataggagatgttgttctacattgtgttaaaaagactgattcatcttggagtactaaaaaaagtaaaggttttaagaatataatttacaaaaataacaaactttctattgatgatacaccaaagtttaatatttcccgggattttgatttctttgttttggaagataatgtttttattaagaacaaaaaaatatttgagtcagttcttagctataaaaaatcacacatttctaatttcagtgaattagtgggtgaggccgaattcagtcaagcttttactgatgcagaacctttaaaaaaatatgttggtaataatgcaatgcagttaagacgtgcctctgcgattaaacaaaagggttattataaaaaccctgactttatgaggagtctacagggtaatgcaaatcgccttagacttaatttgcaatttgataaaaatggaaagataattgtgaatgatgagtgttgtgcggatatctttcaggcattactcgatcatcgactacaatcccactttgctgctcatatttatgatgtgccaaatgcttcgatggttagctag

SEQ ID NO: 96740 - DNA, 528 bp, Candidatus Burkholderia brachyanthoides
atgttaagccggctagtccgagttctcctcgcgctcaccgccatatcgcccttgtcggtgtcgctggcatttcaattcgcccgctcgcgcaactacgtttgggccgccgtcgctttcgcggcgtgcttggcgcttggctttttggcccgagccattattgcggcgtctgcgcgtcgacttgaaaccctgcgtgtgaccatacacaaggccaaaagcgccgacaaggaagtcattggcttttttatcgcttacgcgcttccgttgattttcaaaccccagccttccagccccgatcttgtggcctggctcgtcgctgcggcaatgctgctctttgttctgtggggaacgcagagcacacaggtcaatccggtgcttgggctgcttggctatcatttttacgaagtggacaccgacggaggggtttcttaccttatgatcactcggagacgaataagcaacgtcttgtcggtcaaaagggttgtgcaaatcagcgactttgggatcctcgaagcgcccgaccaagaataa

SEQ ID NO: 96741 - DNA, 723 bp, Candidatus Burkholderia brachyanthoides
atgactcttttcgcgttgatgaaggcgccagcgccgcgaattcttcgtttcagcctcaccgccgaactgcaaagagaggttcaaagaactttcaccgagcagcttgcatttttcgagaattcaatcgaggaagtttttgcgttcgacggacgctattcgcctgagagcgacgaagcgctcgaaatcgcgggatttcaagacgtggatggcataatgaacgccatcgatcgccctttgtttattgaccgattcgatccaaaccgtcattccgccgagaatattttggcgctgtttatgggccacaagcatagcatccgccaagcggctctcattcagatattcgaccgacggagaattatctcaaagaagcatctttcgatgttctattcgggggacacttttcagcagattcgcgacgatggaatcacgctgggcgacagcctattggcagttttggaaaatggcgcgctcaaattcaagagcttccacctgcttcgtcgagttttcgatttgagccagcattaccaagaggcaacgaacgaagacgttgaaactttcgcgttgcacaatgccctttctgtgctcgatgtcgatggttttgtcgcctccgccaaacccgcttgtccgaagaaaaatctcttttatcaacaaatccggcgttctagacgcgcattccggcaaggcaatcgccgaagccgcgctgcaattcaagttggagattga

SEQ ID NO: 96742 - DNA, 594 bp, Pantoea vagans
atgggtaatgtaaaattaaaaatactgctttacattctttcattatggctccttttcttttccctttttataatgtcatgggatagttcttttattaataaatctatgacttatatttttggaagcaaggaaatatcgctgagcctaattggaaaaatgaaaactcggaattttgttttcttgataagcgttttatttatgtttatcggcttctttggagtttggtttttttatatgataacttcttcagggtggagcggcccagaaaaagtgtgtgatgtcactaatgaaaaccatgagcatctagaattcctaactacttatgttatgcctttggtttttactgacgtcaatagcaaaagaacagccattaatttgatggtaatgattatagctattggcgctatttatataagaaccaataagttttattcaaacccttccttggcaataattggatttaaaatatacaagtcaaaaataaagggtcagggaaacaaagaatatatattaatttgtcgggggtacgttatggatgacgcagcaataacatacataaagttagatgaaagtactcttttagttaaagtttaa

SEQ ID NO: 96743 - DNA, 963 bp, Pantoea vagans
atgtttggatctttaatgcctatttgcacttctcagcaaacttcatgcgaattatttttcatattaagcccatctaatgggttaccaaagttttacaggaaagttaatttagatccattagctcaaaaagatttaacagaaatcttcaagaaaaaggtttttgaagaaattatcaataaaaccaacggcttaccatcactgtccttggtgtcgtcgctgtccagtaaaggcaacgatatttatgagtacgatatatcaaatcaagtaactgaatttggcttgattgaagatattagtaagttaacagtttcatcaaacccaactattttcaatttctctaaagatgagatctcggaaattagaggtttggttttaaggctatcagacgggaacgatagtatttatatttatcagcatacttatcaagtttcccttcataaaaagagccggttttcatttatgaagtcaaccacaggtaatgttttagaaggggttgaccgtgacatgttggatataaggaaggattttgacttcttcttttatcaaggtaagcattatattattaatctcaatcttctagaaagggaatacggattaaacgcaataatagataatatggttaacttagccattcctaatattatctctatgaatgttataaacatgactggcgttgttaaccaaaatgccttttttgatgaaataaagagcaatagaacttatatgaaaaaactggcaaaaattcacaacagtggattgccagctgtgacaattcctcaaattcaaacaatattaaatgattttcctaaatttggcagagagttatctattaataacaatttgctggatttaaactctaaaagaagaaagatgttcttcattcgattattgaatgatgaagcagttagatctgcgcttacaaatagtgtttatctggcagatgatagggagtcagcagtttaa

SEQ ID NO: 96744 - DNA, 597 bp, Salmonella enterica subsp. enterica serovar Typhimurium var. 5-; identical to SEQ ID NO: 95980

SEQ ID NO: 96745 - DNA, 978 bp, Salmonella enterica subsp. enterica serovar Typhimurium var. 5-; identical to SEQ ID NO: 95651

SEQ ID NO: 96746 - DNA, 597 bp, Salmonella enterica subsp. enterica serovar Typhimurium var. 5-; identical to SEQ ID NO: 95980

SEQ ID NO: 96747 - DNA, 978 bp, Salmonella enterica subsp. enterica serovar Typhimurium var. 5-; identical to SEQ ID NO: 95651

SEQ ID NO: 96748 - DNA, 597 bp, Salmonella enterica subsp. enterica serovar Typhimurium var. 5-; identical to SEQ ID NO: 95980

SEQ ID NO: 96749 - DNA, 978 bp, Salmonella enterica subsp. enterica serovar Typhimurium var. 5-; identical to SEQ ID NO: 95651

SEQ ID NO: 96750 - DNA, 645 bp, Salmonella enterica subsp. enterica serovar Agona
atgtatgtcttgtctttgttttttttgtttataccaataattttttatttttctggtattgatgatgtctggaacgtttttaccaaagctaatggtttttgtgatggcgtcagtaatcgtattgtctgtataacaggtaatatgggcaaccagctatctctatccgtgtcaaggttatgcgtttgtatttttttggtctttttgtgtggctatacttactggtggtataagagacagctttcatttttggatagggggattacctctgccgaagtggttgttgttggatgcgaaaaagagtcaactgagtatctgtcatttttgtcaacttacataatgcccctggtttttacagacttaacaaaaccttcaaatgttttcaatttcatttttattctagttattgtcggatttcttcatataaaaacaagaaggattcatagcaacccaacgctttcattgtttggtgtttctgcttacaaaattgactatataatcagggttgatggtcaggattctgatatcacaaaaggattgattgtcctgtcgaaggatgagatatctgtgaaaagtgtaattcgaatcataaaaaaagaagactacattacattcgcaaaatacataaggaacgattcaaatggctga

SEQ ID NO: 96751 - DNA, 1146 bp, Salmonella enterica subsp. enterica serovar Agona; identical to SEQ ID NO: 95993

SEQ ID NO: 96752 - DNA, 597 bp, Salmonella enterica subsp. enterica serovar Typhimurium var. 5-; identical to SEQ ID NO: 95980

SEQ ID NO: 96753 - DNA, 978 bp, Salmonella enterica subsp. enterica serovar Typhimurium var. 5-; identical to SEQ ID NO: 95651

SEQ ID NO: 96754 - DNA, 597 bp, Salmonella enterica subsp. enterica serovar Typhimurium var. 5-; identical to SEQ ID NO: 95980

SEQ ID NO: 96755 - DNA, 978 bp, Salmonella enterica subsp. enterica serovar Typhimurium var. 5-; identical to SEQ ID NO: 95651

SEQ ID NO: 96756 - DNA, 597 bp, Salmonella enterica subsp. enterica serovar Hadar; identical to SEQ ID NO: 95980

SEQ ID NO: 96757 - DNA, 978 bp, Salmonella enterica subsp. enterica serovar Hadar; identical to SEQ ID NO: 95651

SEQ ID NO: 96758 - DNA, 597 bp, Salmonella enterica subsp. enterica serovar Typhimurium var. 5-; identical to SEQ ID NO: 95980

SEQ ID NO: 96759 - DNA, 978 bp, Salmonella enterica subsp. enterica serovar Typhimurium var. 5-; identical to SEQ ID NO: 95651

SEQ ID NO: 96760 - DNA, 597 bp, Salmonella enterica subsp. enterica serovar Hadar; identical to SEQ ID NO: 95980

SEQ ID NO: 96761 - DNA, 978 bp, Salmonella enterica subsp. enterica serovar Hadar; identical to SEQ ID NO: 95651

SEQ ID NO: 96762 - DNA, 597 bp, Salmonella enterica subsp. enterica serovar Typhimurium var. 5-; identical to SEQ ID NO: 95980

SEQ ID NO: 96763 - DNA, 978 bp, Salmonella enterica subsp. enterica serovar Typhimurium var. 5-; identical to SEQ ID NO: 95651

SEQ ID NO: 96764 - DNA, 597 bp, Salmonella enterica subsp. enterica serovar Typhimurium var. 5-; identical to SEQ ID NO: 95980

SEQ ID NO: 96765 - DNA, 978 bp, Salmonella enterica subsp. enterica serovar Typhimurium var. 5-; identical to SEQ ID NO: 95651

SEQ ID NO: 96766 - DNA, 597 bp, Salmonella enterica subsp. enterica serovar Typhimurium var. 5-; identical to SEQ ID NO: 95980

SEQ ID NO: 96767 - DNA, 978 bp, Salmonella enterica subsp. enterica serovar Typhimurium var. 5-; identical to SEQ ID NO: 95651

SEQ ID NO: 96768 - DNA, 597 bp, Salmonella enterica subsp. enterica serovar Hadar; identical to SEQ ID NO: 95980

SEQ ID NO: 96769 - DNA, 978 bp, Salmonella enterica subsp. enterica serovar Hadar; identical to SEQ ID NO: 95651

SEQ ID NO: 96770 - DNA, 597 bp, Salmonella enterica subsp. enterica serovar Typhimurium var. 5-; identical to SEQ ID NO: 95980

SEQ ID NO: 96771 - DNA, 978 bp, Salmonella enterica subsp. enterica serovar Typhimurium var. 5-; identical to SEQ ID NO: 95651

SEQ ID NO: 96772 - DNA, 597 bp, Salmonella enterica subsp. enterica serovar Typhimurium var. 5-; identical to SEQ ID NO: 95980

SEQ ID NO: 96773 - DNA, 978 bp, Salmonella enterica subsp. enterica serovar Typhimurium var. 5-; identical to SEQ ID NO: 95651

SEQ ID NO: 96774 - DNA, 597 bp, Salmonella enterica subsp. enterica serovar Hadar; identical to SEQ ID NO: 95980

SEQ ID NO: 96775 - DNA, 978 bp, Salmonella enterica subsp. enterica serovar Hadar; identical to SEQ ID NO: 95651

SEQ ID NO: 96776 - DNA, 597 bp, Salmonella enterica subsp. enterica serovar Typhimurium var. 5-; identical to SEQ ID NO: 95980

SEQ ID NO: 96777 - DNA, 978 bp, Salmonella enterica subsp. enterica serovar Typhimurium var. 5-; identical to SEQ ID NO: 95651

SEQ ID NO: 96778 - DNA, 597 bp, Salmonella enterica subsp. enterica serovar Hadar; identical to SEQ ID NO: 95980

SEQ ID NO: 96779 - DNA, 978 bp, Salmonella enterica subsp. enterica serovar Hadar; identical to SEQ ID NO: 95651

SEQ ID NO: 96780 - DNA, 597 bp, Salmonella enterica subsp. enterica serovar Typhimurium var. 5-; identical to SEQ ID NO: 95980

SEQ ID NO: 96781 - DNA, 978 bp, Salmonella enterica subsp. enterica serovar Typhimurium var. 5-; identical to SEQ ID NO: 95651

SEQ ID NO: 96782 - DNA, 597 bp, Salmonella enterica subsp. enterica serovar Typhimurium var. 5-; identical to SEQ ID NO: 95980

SEQ ID NO: 96783 - DNA, 978 bp, Salmonella enterica subsp. enterica serovar Typhimurium var. 5-; identical to SEQ ID NO: 95651

SEQ ID NO: 96784 - DNA, 597 bp, Salmonella enterica subsp. enterica serovar Hadar; identical to SEQ ID NO: 95980

SEQ ID NO: 96785 - DNA, 978 bp, Salmonella enterica subsp. enterica serovar Hadar; identical to SEQ ID NO: 95651

SEQ ID NO: 96786 - DNA, 597 bp, Salmonella enterica subsp. enterica serovar Typhimurium var. 5-; identical to SEQ ID NO: 95980

SEQ ID NO: 96787 - DNA, 978 bp, Salmonella enterica subsp. enterica serovar Typhimurium var. 5-; identical to SEQ ID NO: 95651

SEQ ID NO: 96788 - DNA, 597 bp, Salmonella enterica subsp. enterica serovar Hadar; identical to SEQ ID NO: 95980

SEQ ID NO: 96789 - DNA, 978 bp, Salmonella enterica subsp. enterica serovar Hadar; identical to SEQ ID NO: 95651

SEQ ID NO: 96790 - DNA, 597 bp, Salmonella enterica subsp. enterica serovar Typhimurium var. 5-; identical to SEQ ID NO: 95980

SEQ ID NO: 96791 - DNA, 978 bp, Salmonella enterica subsp. enterica serovar Typhimurium var. 5-; identical to SEQ ID NO: 95651

SEQ ID NO: 96792 - DNA, 504 bp, Salmonella enterica subsp. enterica serovar Agona; identical to SEQ ID NO: 95992

SEQ ID NO: 96793 - DNA, 1146 bp, Salmonella enterica subsp. enterica serovar Agona; identical to SEQ ID NO: 95993

SEQ ID NO: 96794 - DNA, 597 bp, Salmonella enterica subsp. enterica serovar Typhimurium var. 5-; identical to SEQ ID NO: 95980

SEQ ID NO: 96795 - DNA, 978 bp, Salmonella enterica subsp. enterica serovar Typhimurium var. 5-; identical to SEQ ID NO: 95651

SEQ ID NO: 96796 - DNA, 597 bp, Salmonella enterica subsp. enterica serovar Typhimurium var. 5-; identical to SEQ ID NO: 95980

SEQ ID NO: 96797 - DNA, 978 bp, Salmonella enterica subsp. enterica serovar Typhimurium var. 5-; identical to SEQ ID NO: 95651

SEQ ID NO: 96798 - DNA, 597 bp, Salmonella enterica subsp. enterica serovar Typhimurium var. 5-; identical to SEQ ID NO: 95980

SEQ ID NO: 96799 - DNA, 978 bp, Salmonella enterica subsp. enterica serovar Typhimurium var. 5-; identical to SEQ ID NO: 95651

SEQ ID NO: 96800 - DNA, 597 bp, Salmonella enterica subsp. enterica serovar Typhimurium var. 5-; identical to SEQ ID NO: 95980

SEQ ID NO: 96801 - DNA, 978 bp, Salmonella enterica subsp. enterica serovar Typhimurium var. 5-; identical to SEQ ID NO: 95651

SEQ ID NO: 96802 - DNA, 591 bp, Yersinia intermedia
atgagactaacgggaaatatcgacaagatagggctatatatactatccctttccttactgtttatattcataataattttaagtgctaatgtaccttactgctttggtaatagctgtaagttcataggacttacgaaactgttatcaataaacttagtacctgtagtatgcatattctttatttttattggttgggttttttataaacgattcaaaaatatcacttcgtataacgggttagaatccgtaaaaataacacactgtgaaagtgaaagttatgaaaaccttacttttctagcaacctatattgttccatttatgggttttagttttgatgatatgcagaaaaacctagcatacattttactcatagttgttattggaataatatttgtgaaaacaaacaaatattatgccaatcctaccctagcattatttggctacaaattatataaggtaaatatattccatccgggaagtggcgaaactaaaaatgtcattgcaataaccactgataacctaatggttggtgataatgtcttttatagctttcttgacgactacgtattcatagcaaggaaaaaaatatga

SEQ ID NO: 96803 - DNA, 954 bp, Yersinia intermedia
atgacagttgatatttttaaaggaaaaatagctgaagtcattgaaaatttatcaggtgtaaagttagtattttttgttatagatggtgaggaaactaaaattgaagtttctaaaattgaaccagaggccttaacaaaaataggtgctaactttgcatcaagattacgagatgacattgtaactaatgaagacttaacattacctcttcttacaaatattgatgaccgaaagaacgctttatatctatttgactatgctcaaaagccttacgaatttgaaatcctgaagcaggctctagaattacctcctaattataataactactatgcacctgataatggttttagtaatgtaaagtctttggctatcgtcctgagtagcgataccgattcaatcgccctttataagaacaagacaaatctaactgttttaaaaagcaattcaaatatgcttaacttcctttttaataagaatggtgtattagaagaaatatcaagtgatatatttaaaattgatttcgggtatgatttgattcttctagataacagctactatattaaaaatacaaaaacactagaaatagctatgaagtttcatgaagtaattactgcacaagctagcatagctatagagtccttggcacagtcagaaatgattgcggatatgactcatttaaataaaagttcaaaagatctcccatttgcacgaaagcttgcaaaagttgctaaacactctcctgtgttaggtaagattgatgctccaactgttattgattttgtaagtaagcataaatatctttccaccattatttcaattaacgatagcggtgataaattcatcgtcaaaacgaaaagttcacagaaacatttcatcaaactactgagtgatgattatttagaatccgagttaacgaaaatattatatgacagtctagcaaaagatatgttgcaataa

SEQ ID NO: 96804 - DNA, 597 bp, Salmonella enterica subsp. enterica serovar Typhimurium var. 5-; identical to SEQ ID NO: 95980

SEQ ID NO: 96805 - DNA, 978 bp, Salmonella enterica subsp. enterica serovar Typhimurium var. 5-; identical to SEQ ID NO: 95651

SEQ ID NO: 96806 - DNA, 597 bp, Salmonella enterica subsp. enterica serovar I 4,12:i:-; identical to SEQ ID NO: 95980

SEQ ID NO: 96807 - DNA, 978 bp, Salmonella enterica subsp. enterica serovar I 4,12:i:-; identical to SEQ ID NO: 95651

SEQ ID NO: 96808 - DNA, 516 bp, Yersinia pseudotuberculosis
atgaacaaatttgcacggctattattaacagctagctctattgctcctgtgtgcatcacgttagctttcatcggactagtgaaagatgcgcagtggctggtttactcatcagtgacgatttgcttattaagctggtcatcctgtatttttttcattaaatttgcaaaaaaaaaccttgttgaactcaataaaaatatagattcaatttcaccagcaaataaagaagtcacaaactatttcttgagttacctatttccactacttggcgtcgagtctatatctagtgactggaaatatgctctatttttctacatatctttattattttatatgagtttttctgaaaattataatttcaaccctttactatcaacgcttggatataagttttatgaagcagaagatgatactggcgtaggttttgttcttatatccgaagaggtaataacggatgttcgagacagagaatttaaagtaattaaacttaccgattatacgtacttacatattaaatag

SEQ ID NO: 96809 - DNA, 873 bp, Yersinia pseudotuberculosis
atgcccttatttgcagtcatggatagaaatacagctagccgcataatgagaattgagactgataaagacactgaccatacattggttaagatgtttaacgagcaatatgcaaaatttgaattacatcatgatactgaggtttcatttttcgcagggtataaacctagctttagtgaatgtttttatttagagggttttaccgaatcaaatgaactaattgatgcaataaaaagaagtaccgctgtgccagtgtgggacccgaaaactgttccaatggagcatattaaggcattatttgttgctgtcgaaaacaccaaaaacattaataaaatagcacttcaaacatttaataaaagtcaaattctcgatgtgtcaaaatcgttgtggttgagtgataatgtcttcacaatgtcatcttctgtaggattcaatattgatgagaagttagttgctaccattcatggaaataaaataaagttcaaaagtctacaaaaactgcgaagtatatttgatatggatatttatttctctgaagcaacaaacaaagatttaactgacttctgtgctcatgaagcatttaagattacggaaggttttgatatgaatataattgcagacacagtgataagaacaaaaataactctaattaacaaatcaagaatacttgatgattatgatattgatacgctcaagcttgcagcagataaagtaaattttgacctacaaacatacaatgaaaatggtattgagaaaatatccatgccaagtacaaagaaggaagtaaaatccctcttgacattccttgatgaggatatattcactgctgagattagtaaaaaagtttttcgctcaaactcaaaaaggccatattaa

SEQ ID NO: 96810 - DNA, 597 bp, Salmonella enterica subsp. enterica serovar Typhimurium var. 5-; identical to SEQ ID NO: 95980

SEQ ID NO: 96811 - DNA, 978 bp, Salmonella enterica subsp. enterica serovar Typhimurium var. 5-; identical to SEQ ID NO: 95651

SEQ ID NO: 96812 - DNA, 597 bp, Salmonella enterica subsp. enterica serovar Hadar; identical to SEQ ID NO: 95980

SEQ ID NO: 96813 - DNA, 978 bp, Salmonella enterica subsp. enterica serovar Hadar; identical to SEQ ID NO: 95651

SEQ ID NO: 96814 - DNA, 597 bp, Salmonella enterica subsp. enterica serovar I 4,5,12:i-; identical to SEQ ID NO: 95980

SEQ ID NO: 96815 - DNA, 978 bp, Salmonella enterica subsp. enterica serovar I 4,5,12:i-; identical to SEQ ID NO: 95651

SEQ ID NO: 96816 - DNA, 597 bp, Salmonella enterica subsp. enterica serovar Typhimurium var. 5-; identical to SEQ ID NO: 95980

SEQ ID NO: 96817 - DNA, 978 bp, Salmonella enterica subsp. enterica serovar Typhimurium var. 5-; identical to SEQ ID NO: 95651

SEQ ID NO: 96818 - DNA, 597 bp, Salmonella enterica subsp. enterica serovar Typhimurium var. 5-; identical to SEQ ID NO: 95980

SEQ ID NO: 96819 - DNA, 978 bp, Salmonella enterica subsp. enterica serovar Typhimurium var. 5-; identical to SEQ ID NO: 95651

SEQ ID NO: 96820 - DNA, 597 bp, Salmonella enterica subsp. enterica serovar Hadar; identical to SEQ ID NO: 95980

SEQ ID NO: 96821 - DNA, 978 bp, Salmonella enterica subsp. enterica serovar Hadar; identical to SEQ ID NO: 95651

SEQ ID NO: 96822 - DNA, 597 bp, Salmonella enterica subsp. enterica serovar Typhimurium; identical to SEQ ID NO: 95980

SEQ ID NO: 96823 - DNA, 978 bp, Salmonella enterica subsp. enterica serovar Typhimurium; identical to SEQ ID NO: 95651

SEQ ID NO: 96824 - DNA, 597 bp, Salmonella enterica subsp. enterica serovar I 4,5,12:i-; identical to SEQ ID NO: 95980

SEQ ID NO: 96825 - DNA, 623 bp, Salmonella enterica subsp. enterica serovar I 4,5,12:i-
atgttcacagcaatagataatatattaaattcaacccaactctccggtgaggcttattttgttgcagaacaccaagggcaactagatattttcagagtagctctagaaccaggtgcagaacagaaattaacacagtctttcagtcgatcacttaagcgtgatgttgttgacccaaacactggacagaacaccttgccgttagtttcttctctgctaagtcgagataagcaggtgcatgaatatgatcaccaagtaataaactatcttccacctgctctagcaaagatggcggacgtgcttagctttggagttaataatacacccactgactttgactttgcccagcaaaacctatcaaccgtgaaaggaatagtttattatctttgtgatggtcaaggtaacggagttgttgtttaccaacacaaatatccaatcgcactacataaaaaaacaaaattgtcatatttctctgcgaatggtagaacccttgatgaggtcacccatgatagcattgacataaatgggaatgtggatttcttttactttgacaacaagtattatgcactaaatatcaacttacttgaaagagcatatggccttgaacaagtcataaataatttagc

SEQ ID NO: 96826 - DNA, 597 bp, Salmonella enterica subsp. enterica serovar I 4,5,12:i-; identical to SEQ ID NO: 95980

SEQ ID NO: 96827 - DNA, 978 bp, Salmonella enterica subsp. enterica serovar I 4,5,12:i-; identical to SEQ ID NO: 95651

SEQ ID NO: 96828 - DNA, 597 bp, Salmonella enterica subsp. enterica serovar I 4,5,12:i-; identical to SEQ ID NO: 95980

SEQ ID NO: 96829 - DNA, 978 bp, Salmonella enterica subsp. enterica serovar I 4,5,12:i-; identical to SEQ ID NO: 95651

SEQ ID NO: 96830 - DNA, 597 bp, Salmonella enterica subsp. enterica serovar Hadar; identical to SEQ ID NO: 95980

SEQ ID NO: 96831 - DNA, 978 bp, Salmonella enterica subsp. enterica serovar Hadar; identical to SEQ ID NO: 95651

SEQ ID NO: 96832 - DNA, 597 bp, Salmonella enterica subsp. enterica serovar Hadar; identical to SEQ ID NO: 95980

SEQ ID NO: 96833 - DNA, 978 bp, Salmonella enterica subsp. enterica serovar Hadar; identical to SEQ ID NO: 95651

SEQ ID NO: 96834 - DNA, 597 bp, Salmonella enterica subsp. enterica serovar Hadar; identical to SEQ ID NO: 95980

SEQ ID NO: 96835 - DNA, 978 bp, Salmonella enterica subsp. enterica serovar Hadar; identical to SEQ ID NO: 95651

SEQ ID NO: 96836 - DNA, 597 bp, Salmonella enterica subsp. enterica serovar Hadar; identical to SEQ ID NO: 95980

SEQ ID NO: 96837 - DNA, 978 bp, Salmonella enterica subsp. enterica serovar Hadar; identical to SEQ ID NO: 95651

SEQ ID NO: 96838 - DNA, 597 bp, Salmonella enterica subsp. enterica serovar Hadar; identical to SEQ ID NO: 95980

SEQ ID NO: 96839 - DNA, 978 bp, Salmonella enterica subsp. enterica serovar Hadar; identical to SEQ ID NO: 95651

SEQ ID NO: 96840 - DNA, 597 bp, Salmonella enterica subsp. enterica serovar I 4,12:i:-; identical to SEQ ID NO: 95980

SEQ ID NO: 96841 - DNA, 978 bp, Salmonella enterica subsp. enterica serovar I 4,12:i:-; identical to SEQ ID NO: 95651

SEQ ID NO: 96842 - DNA, 597 bp, Salmonella enterica subsp. enterica serovar Hadar; identical to SEQ ID NO: 95980

SEQ ID NO: 96843 - DNA, 978 bp, Salmonella enterica subsp. enterica serovar Hadar; identical to SEQ ID NO: 95651

SEQ ID NO: 96844 - DNA, 597 bp, Salmonella enterica subsp. enterica serovar Typhimurium; identical to SEQ ID NO: 95980

SEQ ID NO: 96845 - DNA, 978 bp, Salmonella enterica subsp. enterica serovar Typhimurium; identical to SEQ ID NO: 95651

SEQ ID NO: 96846 - DNA, 597 bp, Salmonella enterica subsp. enterica serovar I 4,5,12:i-; identical to SEQ ID NO: 95980

SEQ ID NO: 96847 - DNA, 978 bp, Salmonella enterica subsp. enterica serovar I 4,5,12:i-; identical to SEQ ID NO: 95651

SEQ ID NO: 96848 - DNA, 597 bp, Salmonella enterica subsp. enterica serovar I 4,12:i:-; identical to SEQ ID NO: 95980

SEQ ID NO: 96849 - DNA, 978 bp, Salmonella enterica subsp. enterica serovar I 4,12:i:-; identical to SEQ ID NO: 95651

SEQ ID NO: 96850 - DNA, 522 bp, Klebsiella variicola; identical to SEQ ID NO: 95728

SEQ ID NO: 96851 - DNA, 870 bp, Klebsiella variicola
atgagcctttttgcaatgatgaataaaaactctgctgtgaaagtgtatcgtattgataccgacagacaaacagacatcaaaatcaaaaaaatatttgatgaccaattatctctttttgaaagtcatcacaatacggaacttgttttcgaagccggatatacccctagctataatgaatgtagttatatagataactttgatgaaggaaaaatacttcttgatgcagttcagcgtagcaccgcaatgcctttgtggacaaaaaatgttgggcttaatgatataacagctttttttatggctcctgcgtatcctcaagtgaaagacaaaatagcaatccaaaccttttcaaaaaaacagatacttaacgagtcaagatacttatggctcagtaaaaattcatttacgatgtcagatcttttgggtttcaatctagacgataaattagttgcaatccttgagggagataaaataaagttcaggaacttcaacaacctgagaagcatatttgatatgagttcttattttgctgaagcaacaaagcaagagatttctgactttgtaaaccaaccagtttttaatataccagtggggtttgatcttccagcccttgcagataacgtcataagaaaaaaagtcacattaataaacaaatctaaaatattggtaaatcatactgtaaccgaaataaaaaacgcagcgctaactttgaacttccctataaaaacgaccggctcaggaagctccgagaaaatagaaatgccaacaaataaaaaagaaataaaagagttacttaacttcttggatgaagactatttcaactctgaaataactaagcaaaggtttcgatcaaattcaaaacgtaaagcataa

SEQ ID NO: 96852 - DNA, 510 bp, Klebsiella variicola
atgaacaaaattgcaaggtttcttttaacagcaagttcgatagctcctgtaggtatcacgctgatatttataggatatatgaaaaacaagccatggcttatttggtggtcgttagggatctgtcttgctagttttatatcagttatttttttcctacactatgcaaataaaaacctcccttctctttataagaatgttgagaccatatctcctgcaaataaagaggttaccaattatttcttgagttatctattccctttattagggacagattcaatcgccgataaatggcaatatgcagtatttttctatatatctcttatcgtttatatatgtttctctgagaactataatttcaaccctcttatctccgctttaggatttaaattttatgaagcagaagacgatactggcgttggatttgtgttgatatccaaagaagttattacaaatttaaaaacagagattttgaagttattcaacttacagactacacatttatgcatgtaa

SEQ ID NO: 96853 - DNA, 627 bp, Klebsiella variicola
atgcctttgtggacaaaaaatgttgggcttaatgatataacagctttttttatggctcctgcgtatcctcaagtgaaagacaaaatagcaatccaaaccttttcaaaaaaacagatacttaacgagtcaagatacttatggctcagtaaaaattcatttacgatgtcagatcttttgggtttcaatctagacgataaattagttgcaatccttgagggagataaaataaagttcaggaacttcaacaacctgagaagcatatttgatatgagttcttattttgctgaagcaacaaagcaagagatttctgactttgtaaaccaaccagtttttaatataccagtggggtttgatcttccagcccttgcagataacgtcataagaaaaaaagtcacattaataaacaaatctaaaatattggtaaatcatactgtaaccgaaataaaaaacgcagcgctaactttgaacttccctataaaaacgaccggctcaggaagctccgagaaaatagaaatgccaacaaataaaaaagaaataaaagagttacttaacttcttggatgaagactatttcaactctgaaataactaagcaaaggtttcgatcaaattcaaaacgtaaagcataa

SEQ ID NO: 96854 - DNA, 579 bp, Pseudomonadaceae bacterium E1086
atgcaatttagaatattttcagcctttttgatttttattggctcgtatctacctctggctttaatactggccatccaagacataccgatctcgtggtgggagcggccattttgtgatttttcaaacgttggcgaatgttactttaatccattcgccaacccctacttgtctgtagtgtttcttcttctaactattctttcggtttctttgtcaaatatatctcttaaaaagatatcttttccgttcaaggctaaggtcacaaaggcaaagccaataccaaacgatattattaattatgtgtttccgtatgttgtgtcatttatgggaattagctatgagcatcccgaaaagctcttgggttttgtcgttttcttattttggatgttcgcaataacctataagtcaggccagattataatgaacccgcttttgctcatgtttggctggaaactatacgaagtagaggcggaaataaatggcaatgagagaagtgtaagggttttatttaaaggaaatctggctccaggcgaatatgaggtacaaacaatacaagatttttatattgcaagaggttactaa

SEQ ID NO: 96855 - DNA, 915 bp, Pseudomonadaceae bacterium E1086
atgactgttgaatttcaatctttgaaaaattttgactttgataactcgaatccatttctttggatttttaaagatagcactactgcttcaaagtttcgcacattttatgttcagactgaaaatgaattaaatgcaaaactgaaagagtttgtcagaaatgagattaataggataacggagcacagtccatacacatatatatcgcaaaataacgaaaatagctgtcttacgttagacccatcctcaacagattttaatagtctaaaagctttagtggatcgtcttgaaagtgagcatagaatatcagactccaaggacttaaaaggagctaaagggtatttggttaaatttacattgaatgggcaaacggtttatgccgtaaaacgctctacgtcatcatggaaaacctcgtaccctaagaagtatataaacatgatattttctaatggcgaattgtcggccgttgaggataatagcttttctattgagaaaaactttgacttttatgtctttggcaatacagcgtttatcgcgaacaaacggggttttgagtcttcaatgaaatatcgtgaggagtatgttcaagctttttcccagcttcaacagtcgccctcatttagcggactattttctgatttgtcgtcaatagtagagtatgtaggtagcaattccatacagttgaggagaatggctgtcattgaagagaaagggatttataaccgaccaaattttatccaaaccctacaaagaattagtaataatagagggtggggtataaattttgatcatgccagcaacacaatagttccgtgctcccagactgtgaaggttattatgcaggtcttactagatcatcggttgatgagcgaaattacaaataatatatatgatgttccagatgctaaggagatataa

SEQ ID NO: 96856 - DNA, 588 bp, Vibrio parahaemolyticus
atgcaatttaacttaattgcagcatttacagtttttattggttcgtacttaccattagcgttgatcttggctgttcaagatattccgttctcttggtggagtcgtcccatttgcaagttcgatgatataagtaattgcgactttatcccattcacaaatatgtggattgctattgcctttattgtcattacgctgttatcggtatttttttcaaacttaacgttggctaagattacttatcccttcaaagttaaggttaagtcatcaaaaggaattccaaacgacataattaattatgttttcccttacgttgtctcatttatgggaattagttatgatacacctgaaaagctactcggttttgcggtgttcttactatggatgtttgctattacatataagtctggacagataataatgaatcctcttttgttaatgtttggctggaaaatttatgaagctacagtggactttaacggtcaagaacgagacgtcaggtttttgattaaaggggatttgtcccccggtgaatacagaatccaaaaggttcaagagttttacattggtcaggtaaatgataatggttga

SEQ ID NO: 96857 - DNA, 906 bp, Vibrio parahaemolyticus
atggttgattttgatgcgcttaaagcatttgacttcgcaaatgctgatacatacttatgggtatttaaagaaagtactactaaagcaaaatttagaactaaatttgtacaaactgaagcagagttaaataaagacctaaaaggttttatttgtgctgaaataaacagaattactgagcattctccttacacatacatatcgcaaacaaatgaaaatagctgtttaacgatcgcttttgatagtacagacttcaaattgcttaagtcacaggttgacttaccagaagttgaacatcgtgttaaaagcgttagtgatctagttggtgctaaaggttacgttgtaaagtttataaaagatgatgtggtggtttacgctgttaaaaggtcaacatcaacttggaaaacatcttatccgaaaaaattcgtcaatatggtgttcaaaaatggtgagcttaaaggtgttgagaacaacgctttttccattgagaaaaattttgatttctatgtgattaacgatactgcttttattgctaacaaaaaaggcttcgagtcatcaatgaagcacaaggaagaatatgttcaggcttttgatacacttcaaaagaatcctggttttagttcactgttttctgatgtttcatcaatcgttgagtatgttggctctaattctattcaattgcgtcgcatggctgtcattgaagagaaagggatttataaacaagctaactttatcaaaaaccttatttcagtaaacagcaaaagaaattgggggctgaactttgaaaacgacaaaattgtaccatgcgaaaaaacagtcaaagtcattcttcaggttctccttgaccatcgactgattagtgaaattacggatcatatatacgatgttccagatgccaagccagtataa

SEQ ID NO: 96858 - DNA, 585 bp, Vibrio alginolyticus
atgagggttattgatcaggtaaagctgtatatcttatcgcttatgtttctttttttcttggtcatgcttatttcgttagatacagctccatgtaagcttgctgcgggatgtgaacctttatcagttatcgattatatcaaggctaattggttaccatgtttgatggtttttatgattggcgtatgtgagttaatacgtagagaattcgaatataaattatcgggaaacacctctgatactcttcgtgttttagagtctaaaagtgagagttacgagcatctaactttcctcgctacatatatcattccatttgttggatttaattttgattcaatacctcgcctactagcctatttatttcttctggtgattattggtctgatttttatcagaactggtatgtattacgcaaaccccactttggctatatttggttacaagttgtatcgcatcacacttgctgaccaaaataatcactacgaagctgttacggctatagcaaaggacgatataaaacaaggggttaatgtatattatcaatttatatctaagacggtctgttttgtaaggaaggttagagaatga

SEQ ID NO: 96859 - DNA, 960 bp, Vibrio alginolyticus
atgaatacaactgatgctaaagctgccattaaggaaataactgactcttgcattggtatcaagatatattttgtcgataaatctaaccagatttatgactctgatgtagatgacaaattgttagcggactatcgtgatgattttgtcgatgctttaactagaagctattcaaataatgaaaacttcacttgtcctgctctttctcaagaagacgggcgtaaccatgctctttatcattttgattttgacgatgaggataagccatttgagtttagttttctggatacagtgaataaccttcgtgcagatgaaccattagatacatacccagcaagagatgcggggttaggtaagctacgaggttatattattcgcttacgaaatactgatggcaaagtaatgtcattctttcagtacatacaccattcatacattgcaactccaggaaagacgattttccttaccacacatgagtcaagggttgtaaggctgacacatgacgttcttcgtttaggcaataggttcgtttttgccaaaattggagatgattatttaattgaaaatgtaaacgtattagaaaaagaattcggttttgacaagattattcacagcaaagcagtgcaatattgcgcaactattgaagaaaaatctattgttaatgatttaaccaagtttaaagctcaactgaacaatgatacgtcatttgccagaaagcttgtgaaagtatgtaagggatctgctgttattgaaaaagagattgccaacgatacaattattaaatttgcaatgagcaaggtgtactaccaagaaaaactgaaattaacggaagacgaaagccagtttgatttaggtagtatcaatcgttgtcgacattttctcactctacttgatgatgagtttgttaagtcggaattgactcaacaagaatacatatctaaagcaaaggatagagcttcttag

SEQ ID NO: 96860 - DNA, 588 bp, Vibrio parahaemolyticus; identical to SEQ ID NO: 96174

SEQ ID NO: 96861 - DNA, 987 bp, Vibrio parahaemolyticus; identical to SEQ ID NO: 96179

SEQ ID NO: 96862 - DNA, 597 bp, Salmonella enterica subsp. enterica serovar Typhimurium var. 5-; identical to SEQ ID NO: 95980

SEQ ID NO: 96863 - DNA, 978 bp, Salmonella enterica subsp. enterica serovar Typhimurium var. 5-; identical to SEQ ID NO: 95651

SEQ ID NO: 96864 - DNA, 597 bp, Salmonella enterica subsp. enterica serovar Typhimurium var. 5-; identical to SEQ ID NO: 95980

SEQ ID NO: 96865 - DNA, 978 bp, Salmonella enterica subsp. enterica serovar Typhimurium var. 5-; identical to SEQ ID NO: 95651

SEQ ID NO: 96866 - DNA, 597 bp, Salmonella enterica subsp. enterica serovar Typhimurium var. 5-; identical to SEQ ID NO: 95980

SEQ ID NO: 96867 - DNA, 978 bp, Salmonella enterica subsp. enterica serovar Typhimurium var. 5-; identical to SEQ ID NO: 95651

SEQ ID NO: 96868 - DNA, 597 bp, Salmonella enterica subsp. enterica serovar Typhimurium var. 5-; identical to SEQ ID NO: 95980

SEQ ID NO: 96869 - DNA, 978 bp, Salmonella enterica subsp. enterica serovar Typhimurium var. 5-; identical to SEQ ID NO: 95651

SEQ ID NO: 96870 - DNA, 597 bp, Salmonella enterica subsp. enterica serovar Typhimurium var. 5-; identical to SEQ ID NO: 95980

SEQ ID NO: 96871 - DNA, 978 bp, Salmonella enterica subsp. enterica serovar Typhimurium var. 5-; identical to SEQ ID NO: 95651

SEQ ID NO: 96872 - DNA, 585 bp, Stenotrophomonas maltophilia
atgcaatttcggatgtggtcagcaggagtgctttttctagggtcgtatgccccgctggcctttgtactggcggcgcaagacatcaaaaaagcgctgtggggagaacccgtatgtggttggagaggacagtttgattgcgaacttcagatctttgagcacccttgggcatccttggcagcaatagtggttacatcagccgcactttggctgacgatgtattccatgaaggctgtccgactgaaggtcgaagctgaagttctgtccgcgaagcccgttccgaatgacctgattaattatgttttcccctacgttgtatcattcatggggttgagttacggagatccacagaagttggcgggattcttcgtatttcttgtcctcttgttcttgattacgtatagatcggggcagattctgatgaaccccgtattaattgcattcggctggcgactgtatgaggttgatatcgttgtcgggggaaacagggtccgtaagaccgtgcgcgcgctgaagcagggaaagctgctgcctggcgagcagcttattgaggatgttcaggaagtatatttgatgagggatccatga

SEQ ID NO: 96873 - DNA, 921 bp, Stenotrophomonas maltophilia
atgagcgatttggcattgaatagcctcaaaggatttgacctggctgggtcaaaagtgttcctttgggtttttaagaagagcgttggtgcgaagaaattcaaggcttactacatcaagacggatccagtcctggaggattctctcaaagggtttgcggaaaatgagagggctcgaattaacgaatggattccatatgggcatctctctcagcccaccgacgatggatgcctcactattgctgttggtgataccgactttcaggttctaaaggacctagttgatgagcctgaggctgaccatgcgactaatgatcttaagaagctcaaaggcgctgtcggctacctggtgaagtttgtgaaggacggggagaccctctacgccacgcggcgcacgccgatgacttggaagcctgtctacaaaaagaaaaatgtgattaatgccatttttaaaaatggacagttgtccgctgtagcaggtgatgagttcacccttgagccgcgatttgacatcttcgccttggacgatgttcttctggtgtcgaacaagaggggctttgagtcaatgatgcagtatcgcgctggttacgttcaggcatttggcgagctcaaagccgagccgtctttctccgctctctttacagatatggcgccattgttggaatatgtcggtgagaacggtacgcacttgaagaggatggcggtcatccaggaaaagtccctttactctgaccccaaatatctcaaggcgctcaagaccgttgcgacgaagcggaagtggggcgtaaccttcgataaggctgggaaaataatcccgactgcagcgaatgcaaaggtcatcattactctcttgcttgatcaccgtcttgtaagtgagatcactgacatcatgtatgacgttcctgatggcacccccgtaaaataa

SEQ ID NO: 96874 - DNA, 582 bp, Pseudomonas coronafaciens pv. porri
atgcagtttaggcttagcgctgcgttcctgattttcattgggtcttatacgccgctggcaatcattctcgcgatccaaaatattccattcgagtggtggtctcgccctatttgcgaacttcctaaattactggcgttgacgtgcgctatcaacccatttagaaacccgtcgctcgctattttaatggtcgcttttactgtaagttcggcatttttagcgagccaactctttaaacggatcgccttcccgtatcgcattgaagtcgtatccgttaaagcggtacccaacgaaattatcaactatacatttccctatgtagtgtcattcatgggaataagctactccgaaccggaaaaacttacaggttttttggtgtttctcctgtggatgtttgccatcacctacaagtctgggcaaatcatcatgaatccgcttttgttgattttcggttggaatctttatgaggccaatatccaaatcaatggtgtttcgcgagtggtaaaaattctgaaaagaggatatttccctcctgggaattacaaagcacaaaccatccaagatttttatatctgcaaggagtag

SEQ ID NO: 96875 - DNA, 915 bp, Pseudomonas coronafaciens pv. porri
atgcaagtacactttgatatctttaggagttttaactatatagattccacagtgcacttgtggattttcaaaaaaagcaccacagatcgaaaatttaacgctgcatatgtccaaactgatgagaccgtcaataccctgcttaaaaatgtgctgatccacgaggtcaatcgaaccactgaatttgcacaatactcctaccttgctcaaacgaatgacaacagttgcttggctgccccagcacttgcaacaaatttttcgctattaaaggtccaggtagaccgcccagagcccgagtgtgccgtaaattccgttgacgacctaaagggtactcaaggctacgtggtaaaatttactcataatggccaaaccctctatgcagtgaaacgctcaacggcctcatggaaaacttcttaccctaacaaattcatcaatatggttttcagtaacggcgagctcaccgctgccgaggataacggttttactatagaaaaaaactttgacttctactgttcggtagacacattgttgatcacggctaaacgcgcatttgaatcactgatgcaatacaaagaggcttacactcaagcattcacggagttgcaagcagatcccgatttttccaacttattcgctgatattactccccttgtcgagtatatcggaaccaattccacacaattgcgacgcatggctacgattgagcaaaaatccctttattcaaaccctggtttcatgaacagtttgaaacaagttaatgcgctaaggaactggggtttgaactttgaccaaacgaatgataagattatcgtctgcagtgcaacggcacctacgattctacaagttttgttggatcaccgcttgatgagtgaggttaccagtaatatttatgacgtgcctgatgcaattcaaatttga

SEQ ID NO: 96876 - DNA, 615 bp, Escherichia coli; identical to SEQ ID NO: 95636

SEQ ID NO: 96877 - DNA, 1023 bp, Escherichia coli; identical to SEQ ID NO: 95821

SEQ ID NO: 96878 - DNA, 600 bp, Pseudomonas stutzeri
atgcgcctaactttctgggtggaaattgtcgtctttttatctgcttattatccgctcttcctgatattgctaataagggatgtaaaagagggtgggcatggcatacccatcggcagtgctgagtggaacctaagcgtaaccggctggggggtctccttgttcttggtttcatctgtctctagcttggttctcgcttatatcatgcgaaaattgctgaaaagacaggagggaggtacagctataaaggttcaagaggcagatccaatatcaggcgatatgcttaattatactcttccttttttaataggtctttttgcttttagttatagcgattggcaatccattgcctcgctgctggttttccttgcgttcatgcttgcctttcttcataaggagcagattactctgctaaatccaatgctcctgttgatgaatgtgcggctatacaaaataaaatataaagaagttggtcgtgagcgtttctgcagcgcctttgctctatgcttggggagtgtagaggcatctaatgtgaccgtgaatatcaaagaaacggcagggattacatttatttatccgtgtggggataggacgaatgaataa

SEQ ID NO: 96879 - DNA, 750 bp, Pseudomonas stutzeri
atgtatacaccgcaagatgataggttcttctatgttgagagttcggcgaccgatctcagtcagcttatttctgaggtcgaaacacaaaatctggaagctgttaaaaccattgatgagctcaatggttataactcctacgctatacaagtaacatttggtgagcctgagcagagcgtcttcgcgtatcgttatattcgagctgcgtggtcggccaaaaagaccaagggtaattttctggagttcaaaactgtcaatggcgagcttgttgtggagatcgatagctcgacccgttttgagataaatccttatttagattttttgcagtttaaagatgatgtctttatagccaatattgcctcctttgaagttgctatgaactatcatgagcggctcaaggagaaaaaggaagaggcaataaaagcgcttttcgagagcccgaatttagtcgtcggctcagaggaagttttcaaaaatttggtgggtctcgataagcgcttaatgaggcagctggcggcggctcatgaaaagggttactactctaacaaagagtgggttgcaaagcttagagtggcggctgaagaagcaggcaattggcgcattaagtttaatgatcaaggagagatcgaaatagatgatgacaaggattatataaaagagcttttgatattgctccagaataagcgggtgaaaactgttgtggacggtatcgttgcggatgtagatggggagcttatagcgctagccaactga

SEQ ID NO: 96880 - DNA, 618 bp, Vibrio vulnificus
atgagaaagaacagattgcatcttggagcaaggttttcgttgtttattgtttcttacctgcccttattctttatcatgtgtttcacacaagtatacacatataaggaacatttatattggggcggatttaatggaaaagctctatataactttattaagtattttggtgctgtgagtgtaattatcatcgtatcagtctttggcttaattggtctgattgttttattgaaaaatgtaaagagacggtgcgctactagtggtagagaagtaaaaatactggatattgaaaataaaaacagtgaatctatcacttatttatttacttaccttataccttttgtttttcaagacttatcatcttttactaatgtagtatcaatcactatattgctgtctgtaacattcttgatttatgttaactctggaatgattttgatcaatccaaccatcagtatcaaatacacactatatcaagttacatatctagatattgaaagtgacaagacaagaaaaggaatgttgttaactaactgtaaatatctagaagacggagacttggtcgaaatcgaagatgtgggccataagcttttctatgcaaatttaattgaggatgaatga

SEQ ID NO: 96881 - DNA, 1020 bp, Vibrio vulnificus
atgcttgaattggaagatttactggaatatgcagaagaacttaaagtagataaaaaggctaaggtttcgttatattttataacaaggcacctaaagccgggtatgagtagaactgcgaaagttttagataaatatgatttcaaattaactcaagcaccaatatctccagatatagctaaattctttaaggatacactatcaaatcagatttcttctcatgcatctaaagatgatgtggagtttaaacaatacaccgttattgatgacgatcttgataataagatatatacatatgctctaaataatgcaatatctttttccaatgtaattaacgaacatatcaaagccgataacatccccgttatgggcaaactaaatgatatccagtcagaattatgggcctattgtataaaggttcagagaaataaagaatttacatactcatttagacgtataagtaaaggaaaagtaactaccaatgagcctcaagatctaaaacaaaagctatctgcgatattcgataaaaccggcggagagctaaaagaattcgatggaagtgttgtaagcttcgacgacaagatagattgtatctacatcgatgaacagttttatgttttccataagaaaagctttgaggctattgtaggcctagaagaagagtttaaagaagcggcagtgaaaacgttaaagataatagaagaatgcaacatggtcgagggcttagatattattgaaaaagccattgtccataaaccttccctaaggaaaacgctaacccatatagcagaaaaaggaaaccacacatcattggatgtaaatgaagttcaatcaatgaacgaggttttgaggaagtttcaaaatactgaatttaagatcaatgatgacggaaagatcgtcttggaaactgaagctgatggtaagaacttcctaaggcttcttaacgattactacaaacagggaatgacaactaagaaatactacgctacggacagcggtagtattgtaaatccaactaactaa

SEQ ID NO: 96882 - DNA, 609 bp, Asanoa ferruginea
atgcagctcaggatcctcttcgcaatcgccatctacctggggtcctacctacccctgagcctgatcctgctcgcgcaggacatcgacacggaagtcgtgaagcgtgggatctgcccggtcgggtcgatgatcacgctcgggtgcgcgagcccgctcaagaacccgctctactccctcgccgcggtcgccgtttgcgcggttggcatgctggccaccttcctcgcgctccgcgtcttgcgaacctcgcagcgcgtgaaggtgacggagagcaagcacattccggcggacctgatcaactacgtaatcccgtacgtcgtttccttcatcagcctggacttcgatcagggcaccaagctcatcgggttcacggtctttctgatctggatcttctggatcacgtacaagtccggccagatcgcgctgaaccccgtgctcgcggcgttcggctggaagctgttcgaggtcaagtacatcttccacgggggtacttcgactttcgttggtcgcgtgctgtccaaggtcgatatagaacctgatcgtgcctaccttcaggggtacctgcaggacgtgatggtcgtgcggaatgacgagggggacgccagccgatga

SEQ ID NO: 96883 - DNA, 915 bp, Asanoa ferruginea
atgcttccggacctgaaggttttcaatctggcggaagcggacgtgacggtatgggttttcaggagatccccgggcaaggacgggcgaccaaagttcacgggccgctgggttggcatcaccgacgagcttgccgacaagcttagggaggcggtcggcggcgctctcgacgggatcagcgagaccatcgagtacgacgtgttggtgcagaacaatgagggcagtgccctcaccattgagaccgacgagacctacgtgcacctgatcgccgccgaggtggcgaacgacacgcccggacggaaggctcgcagcgtcaaggacctggccaacagcaagttctgcgtcataaagttcgtcaaagacgacaagaccatgcttgccgtgagcaagaacgacacgagctggtcgacgcggaaaaccgccggcttcattcgtacggtcttctccgacaacgagctgggcgtagaggagtcccccgtcttcaccatccgaccgaacttcgatttcttcgtgctcggcgaacgcatcttcatcaggagcaaaccgaacttcgaggcggtgttggtgtacaaagcagggcacgagcaggcgttctcgaccctgaagcaggaggctcagttcgtcgcactgttttcggatctcggtccgctcgacgaatttgtcggatccaacaagatccaccttcgtcgtgccatcgcgatccatgcaaaggggcactacaaggacgccgacttcatggcgcgcctggtcgcagagcataagaacatgagcctcgacattgccttcgacggtcaggggcggatcgttcccaccgccgagacctgccgtcatatcttccaggccctgctgaaccaccggctggagtccaggctcgacacgaagttctacgacgtgccaagcaccgagcccgtcggctga

SEQ ID NO: 96884 - DNA, 516 bp, Escherichia coli; identical to SEQ ID NO: 95682

SEQ ID NO: 96885 - DNA, 894 bp, Escherichia coli; identical to SEQ ID NO: 95683

SEQ ID NO: 96886 - DNA, 519 bp, Escherichia coli; identical to SEQ ID NO: 95748

SEQ ID NO: 96887 - DNA, 885 bp, Escherichia coli
atggcactttttgcagtaatagataatacaattgcaacgagaattgttagagtcgaacttgatgcaacagcaagtacttctgttacggccattttccaacaacagcgtcaatattttgaaagtcatcataacaatatgataccattctatgccggttatacaccaaaacatagtgagtgttttgaaatacaaaactttactgattctgcacgcctgattgacgcagtcaataggcctaccgccgtgcctgtctgggatcccagccaaattgatattggttatattaaagcattatttgttggtgttgacgcgccagcaaaccccaatattattgcgctacaaaccttcaacaaaaaacaaatcttagatacctcaaaatcattctttggaaagctttttgcaagcaaaactacctttagtaaagctaatagcatcggttttaatgttgatgataaactagttgcaataattatcaatgatacaatacgatttaagagtttctttaatctaagaagcatttttgacatgttgtcctatttttctgctgctactgaccaagaacttaatgcatttagtcaacttagtgtattttctactccccaaggttttgatctaaaatccgttgcagatacagtgataagaaataaagtaacactaataaatcagactgggatgctaacaccccaaaatatgtcaaagtttaaatccgaagctgctaaagtcaatttccccttacaaaccataatagttggcggtgttgagaaaattgtcatgccttcatcaaaaaaagaaataaaagcccttcttgactttcttgaggaagacatttggatttctgggataagtggaagacgctttaaatcgaattcaaagcgcccaatataa

SEQ ID NO: 96888 - DNA, 615 bp, Escherichia coli
atgagagtaaataaattacatttaggagccagggtttctttattcatcgtgtcctatctccccctgttttttatcatgtgtttcgttcaactatatacctatagtgattatttgaactggaaagggataagtattgaatctgtaacgattttcttcaaatattttggtgctgtaagtttcctgatcgtattgtcattatttggtatctttggcttaaaagtttttcttataaatataaaacgccgatgccagacaagcggtagaacagtaaagattttagatatagagaataaaaataatgaatcaataagctatctctttacgtatattataccatttgtgtttcaagatttatcaaaaatatctaatgttgtgcctatagctatattactaacagttactgcattgatatatatcaattctagtatgatactcataaaccctacaataagcataaggtatacactctatcaaataaattacttagacattgagagtgaaaaaaaacgcagtgggatgattttaaccaaatctaaatatttagaagaagatgatcttcttgacattgaagatgttggtcctaaacttttttacgctgaaactcataaggtataa

SEQ ID NO: 96889 - DNA, 1023 bp, Escherichia coli
atgttaaagcttgaagaattgcttgaatacgcagagcaaataaaagacaatgaaaaggcgaaaattactttatattttgtcactagacatctcaaatctggcatgagtaaagcggcaaaagtcacagacaaatacgactttaaagtagttaaagcacctatagctcccgacattgctgatttttttaaaagtacgttatcgaatcaaatcatttcccatgcatcaaaagatgatatagaaatgaaaaattacactgtaatagatgacgatattgataataaaatttatgcatatgcaatgaataatgccatttcattctctaaaatcatcaatgaagatataaagaatgacaggctaaacgttcttaactctttatctgaagttcaggaagatctgtgggcatactgcattaaagttcaaaatggtctggaacttacctactccttccgaaaaatcagtaagggaaaagttacgaccaacgaacctcaaaatattggccagcgtgtatttgccttatttgataaatcagataaagaattaagagcatttgatgggagcgctattaattttgatgataaaattgattgcatatacattcaaaataaattctatgtatttcataaaaagagttttgagtctattgtggggcttgatgctgaatttacagaagccgcacaaaaaactctaaacacgattaaagagtttgatttggttgatggcttagagattattgaacaagcaattctacataaaccatccctacgaaaaacacttgctcatatcgctgaaaaaggtaatcacaccacattgaataaagatgaagtacaatcaatgaatggtgtgctcaaaatgtttcaagatgaagagttcactatcaatgatgaggggaaaattatcattgaagatgaaaggcagggacggaacttccttcgacttctcaacgattattataagcaaggaatgactacaaagaaatactacggcactgatagcggtaacttagttaatccagttaaaagctaa

SEQ ID NO: 96890 - DNA, 519 bp, Escherichia coli; identical to SEQ ID NO: 95748

SEQ ID NO: 96891 - DNA, 885 bp, Escherichia coli; identical to SEQ ID NO: 95749

SEQ ID NO: 96892 - DNA, 519 bp, Escherichia coli; identical to SEQ ID NO: 95748

SEQ ID NO: 96893 - DNA, 885 bp, Escherichia coli; identical to SEQ ID NO: 95749

SEQ ID NO: 96894 - DNA, 597 bp, Salmonella enterica subsp. enterica serovar Typhimurium; identical to SEQ ID NO: 95980

SEQ ID NO: 96895 - DNA, 978 bp, Salmonella enterica subsp. enterica serovar Typhimurium; identical to SEQ ID NO: 95651

SEQ ID NO: 96896 - DNA, 597 bp, Salmonella enterica subsp. enterica serovar 4,12:i:-; identical to SEQ ID NO: 95980

SEQ ID NO: 96897 - DNA, 978 bp, Salmonella enterica subsp. enterica serovar 4,12:i:-; identical to SEQ ID NO: 95651

SEQ ID NO: 96898 - DNA, 597 bp, Salmonella enterica subsp. enterica serovar Typhimurium; identical to SEQ ID NO: 95980

SEQ ID NO: 96899 - DNA, 978 bp, Salmonella enterica subsp. enterica serovar Typhimurium; identical to SEQ ID NO: 95651

SEQ ID NO: 96900 - DNA, 597 bp, Salmonella enterica subsp. enterica serovar Typhimurium; identical to SEQ ID NO: 95980

SEQ ID NO: 96901 - DNA, 978 bp, Salmonella enterica subsp. enterica serovar Typhimurium; identical to SEQ ID NO: 95651

SEQ ID NO: 96902 - DNA, 597 bp, Salmonella enterica subsp. enterica serovar Typhimurium; identical to SEQ ID NO: 95980

SEQ ID NO: 96903 - DNA, 978 bp, Salmonella enterica subsp. enterica serovar Typhimurium; identical to SEQ ID NO: 95651

SEQ ID NO: 96904 - DNA, 597 bp, Salmonella enterica subsp. enterica serovar Typhimurium; identical to SEQ ID NO: 95980

SEQ ID NO: 96905 - DNA, 978 bp, Salmonella enterica subsp. enterica serovar Typhimurium; identical to SEQ ID NO: 95651

SEQ ID NO: 96906 - DNA, 597 bp, Salmonella enterica subsp. enterica serovar Typhimurium; identical to SEQ ID NO: 95980

SEQ ID NO: 96907 - DNA, 978 bp, Salmonella enterica subsp. enterica serovar Typhimurium; identical to SEQ ID NO: 95651

SEQ ID NO: 96908 - DNA, 597 bp, Salmonella enterica; identical to SEQ ID NO: 95980
  subsp. enterica serovar Typhimurium str. ST1489

SEQ ID NO: 96909 - DNA, 978 bp, Salmonella enterica; identical to SEQ ID NO: 95651
  subsp. enterica serovar Typhimurium str. ST1489

SEQ ID NO: 96910 - DNA, 597 bp, Salmonella enterica subsp. enterica serovar Typhimurium; identical to SEQ ID NO: 95980

SEQ ID NO: 96911 - DNA, 978 bp, Salmonella enterica subsp. enterica serovar Typhimurium; identical to SEQ ID NO: 95651

SEQ ID NO: 96912 - DNA, 597 bp, Salmonella enterica subsp. enterica serovar Typhimurium; identical to SEQ ID NO: 95980

SEQ ID NO: 96913 - DNA, 978 bp, Salmonella enterica subsp. enterica serovar Typhimurium; identical to SEQ ID NO: 95651

SEQ ID NO: 96914 - DNA, 597 bp, Salmonella enterica subsp. enterica serovar Typhimurium; identical to SEQ ID NO: 95980

SEQ ID NO: 96915 - DNA, 978 bp, Salmonella enterica subsp. enterica serovar Typhimurium; identical to SEQ ID NO: 95651

SEQ ID NO: 96916 - DNA, 597 bp, Salmonella enterica subsp. enterica serovar Typhimurium; identical to SEQ ID NO: 95980

SEQ ID NO: 96917 - DNA, 978 bp, Salmonella enterica subsp. enterica serovar Typhimurium; identical to SEQ ID NO: 95651

SEQ ID NO: 96918 - DNA, 597 bp, Salmonella enterica subsp. enterica serovar Typhimurium; identical to SEQ ID NO: 95980

SEQ ID NO: 96919 - DNA, 978 bp, Salmonella enterica subsp. enterica serovar Typhimurium; identical to SEQ ID NO: 95651

SEQ ID NO: 96920 - DNA, 606 bp, Rhizobium acidisoli
ttgcaactacgattctgggcatcactcgtcgtattcattggttcatattttccactgagcctgatcctgctcgtccaggattttaagtatgaggtgttgtgggctccaatatgctggcctccgaacggcaatacctgcgcgctaccacttcgaaatggctcgctctctttgagcatctttgtactgagcctaatttgcgtattcattacactcggcgtgctctcaacggttcgcccgaaaacgcccattcgggtgcatgaggcaaaatacatcccagctgaactgatgagctacacgcttccgtacgtcgtctctttcatgagccttgactacagggacactggaaaattcgtgggtcttctaatcttcctcggctggatgtttttgatcacttacaggtccggacaactcatcctcaaccccctactcgctgtttttggatggcgattgtacgaagtctcgctttcttaccctggtgatgagaagcgatatcccgtccgagcaatgtcgaaggacgacctgcagctaccggggccggcagatgctgcgaccatccaagatgtaatgctgattaaatccaaaaggccgaaggcagacgattcatga

SEQ ID NO: 96921 - DNA, 927 bp, Rhizobium acidisoli
atgaccactttacaagatttgaaagcccttgaccttgctggtgcacaggtcacgctttggacaattaaagggcctacagggccagccgcaaacgcgccgaaattctccggccgatgggtcgagaccagcgatgaagtcgatgacgccctgaaggctacgttggtctctgaagtggccaaaattgaggaagtgcttgaatacagcctgcttgcccaaaacaatgaagctagtgccctccaaattcctgccgacgagacgcatgccgatcagctgctgcaggagatcgccgccgagttgcctgggaagaaggccaccgagacaaagcatcttcagaattccgcgttctacgcagcgaaatttgttataggcgaacaggttgtatgggcactcagaaaaacagaaccaagctggaagacgaagaaagctacatctgtcaggaatttattcttctctgatcagcagcttgcaattgatgatcggccccacttcgagctggggaagactttcgacttcataatttttagcgataacatcctagtccgaaataagggggcgtttgaatcgatccttcgctacaagagcactcagcgggacgatttcgcagaacttcaggctgagggcgatttcctggcggtttttgtcagcgttgctccccttgttgagtacgttggagacaacaagattcagttgcggcgcgcttgcgcgatcaaagataaaggacattaccgcgaccaggccttcatgcaaaggctgcgagacaatcaagccgagtacggcttcaatattgagtttgacggaggcggtaagatcgtagcgaccgtggaaacctgcccacagatcatgaaggccctgctagaccaccgactgaaatcaggtttctcaacgctagtctacgacgttcaggatacgacgcgagttgctgtctga

SEQ ID NO: 96922 - DNA, 612 bp, Listeria monocytogenes; identical to SEQ ID NO: 96206

SEQ ID NO: 96923 - DNA, 942 bp, Listeria monocytogenes; identical to SEQ ID NO: 96207

SEQ ID NO: 96924 - DNA, 636 bp, Yersinia enterocolitica; identical to SEQ ID NO: 95668

SEQ ID NO: 96925 - DNA, 1008 bp, Yersinia enterocolitica; identical to SEQ ID NO: 95669

SEQ ID NO: 96926 - DNA, 618 bp, Bacteroides ovatus; identical to SEQ ID NO: 95602

SEQ ID NO: 96927 - DNA, 1017 bp, Bacteroides ovatus; identical to SEQ ID NO: 95603

SEQ ID NO: 96928 - DNA, 594 bp, Enterobacter cloacae; identical to SEQ ID NO: 95890

SEQ ID NO: 96929 - DNA, 972 bp, Enterobacter cloacae; identical to SEQ ID NO: 95891

SEQ ID NO: 96930 - DNA, 522 bp, Klebsiella pneumoniae subsp. pneumoniae; identical to SEQ ID NO: 96022

SEQ ID NO: 96931 - DNA, 870 bp, Klebsiella pneumoniae subsp. pneumoniae
atgagcctttttgcaatgatgaataaaaactctgctgtgaaagtgtatcgtattgataccgacagacaaacagacatcaaaatcaaaaaaatatttgatgaccaattatctctttttgaaagtcatcacaatacggaacttgttttcgaagccggatatacccctagctataatgaatgtagttatatagataactttgatgaaggaaaaatacttcttgatgcagttcagcgtagcaccgcaatgcctttgtggacaaaaaatgttgggcttaatgatataacagctttttttatggctcctgcgtatcctcaagtgaaagacaaaatagcaatccaaaccttttcaaaaaaacagatacttaacgagtcaagatacttatggctcagtaaaaattcatttacgatgtcagatcttttgggtttcaatctagacgataaattagttgcaatccttgaaggagataaaataaagttcaggaacttcaacaacctgagaagcatatttgatatgagttcttattttgctgaagcaacaaagcaagagatttctgactttgtaaaccaaccagtttttaatataccagtggggtttgatcttccagcccttgcagataacgtcataagaaaaaaagtcacattaataaacaaatctaaaatattggtaaatcatactgtaaccgaaataaaaaacgcagcgctaactttgaacttccctataaaaacgaccggctcaggaaactccgagaaaatagaaatgccaacaaataaaaaagaaataaaagagttacttaacttcttggatgaagactatttcaactctgaaataactaagcaaaggtttcgatcaaattcaaaacgtaaagcataa

SEQ ID NO: 96932 - DNA, 567 bp, Candidatus Methanoperedens sp. BLZ1
atggctaagcaagggcatccagagggcatgagattggcgcgattactgatggtattgagtagtatttcgccgttgttcatcctgtggggaattcgtggcaatagtctcatccctgacaattactttttaccgttctgcgggtttatggttattgtaccgaatctgttcctgtggcaacgcatacgcactgcgcgcaaactcaaagaaaaacgggagttggttgtgggcacggcagaagaccatcgtgagcatctgttggtgtatctctttgccatgttgctgccattctacgctgccgacctcggaacgtaccgcgatcttgctgcagcgttcgccgccctcggcttcatcgtgtttttgttctggcatcttaatctacattatatgaatctgctctttgcggtactcggctaccgcgttttcacggttaatccgccagcagataacaatccactcacaggtaaggttagccaggtacttattacacgtcgcactctcgttttaccaggtgagcgtctgattgtttacggtctaagcgatacggttaccatggaggtagaagaatga

SEQ ID NO: 96933 - DNA, 924 bp, Candidatus Methanoperedens sp. BLZ1
atgaatctgaattttgatattagcaacgttacggtcacggagtttggcgtaggtcgggacaatggagatggtcgagatttcgaccgcgttacggtagatgggaatgtgcaaaatgctttacaggaaatggcagaagctacatgggtagctatgcaggcacagaccaataacccgcctagctacgagccatcggaaaagcatgccagcattgaatacagacacttgcccctgaataacaatatggctgaaacgatgcgaaacttgcaccaggcgaacaatctgccgccggattcgacggccttggcagacactgaaaaagttttctgctacttcgcacgtttcacagacttacaaaaccggaagctgactgccgtgcgccgggctacacaattcaaaggggtgttgaaaagtcgacttcttcgctgggatacagacgccttgcagcttattgaagatcgcgtcttcaaattggacaacgacttcgacttactcattgatgcagagaatattcatattctccgtccaagcggttttgagttcgtcgggcagcttcaggaagcgatcatggaggccgtgtcaaccaacgtgacattgcttaaagatgatatcgctttcttagatttcgacgccatcgaaaattacgccagcaggcatccgcgtgctgcccgctatctcgcctcaattcgctctaaaaatgaagctttgaacattgattgtggatgcctgcaaaaattgtgtgccgacaacggagttaagttgacggagaccgatggaatcctattgctggaggaaacagaggtgatgggctttctcgaagtactcgatcggcgtcgttatgaaatcgaactggtagccgataagcccgagcattatcgcgctgcaagtcgcagcaagattgatacgggaggtcaggatgttcaataa

SEQ ID NO: 96934 - DNA, 636 bp, Yersinia enterocolitica
atgacaagcacaaactctaacagtgcatcattcgataatataaagtttaaatattatctttattttttatctttatgggttttatttttatctgtatcaataatgtcatttgattgggtcttttttgaaaggctaatgaaattcctatcattacaatacgcgccagactatatagtcaataatgcttataagctaaaaattaggaattttgtttttattttctgtatttcaatggttttatttggtattacctctgtgttctatttattctcatctttatccagaggctggggaagcactagaaaggttataaatgtaaaaaaccaaactcacgagcatttggagtttttgactacatatgtcatgcctcttgtttttacagacgtaaacagcaaaagaacagtgataaatttattgctaatgatttgttttattggggtgatttatgtaagaactaacaggttttatgccaatccttcacttgccattctaggtttcagattatataaatgctctattaagagtgattcttcttgtaaggaatacactataatatgcagagggaaactatcaaatggcagtcaagtgaaaattaagaaaattgatgatgatactttaatcgctaaacttatataa

SEQ ID NO: 96935 - DNA, 1008 bp, Yersinia enterocolitica
atgaaagcagagttggaggaatttgttcaaagtgacggtctttctggtgagatgttctttattataaaaaataacaataactatatttatcgacgagtagttttacatgatgaaaatacagagccgcttataacagaaaactttaaattatctatcgccaatgaaattctcaagcgtattgcagttgacgataatggtggtgagataatagataatattacagatatgaactatgaaaacaaaggtatctattattttgatatttcagataatgataaaggtgaagtaattaaaacaatagaggaaatatcatctctaactttagctgacaaccctgtggatttcaaatttaatgatgctagtcttgatgatatcgtaggccttgtttatcatattagcgatggtgataaaaatatttatttataccagcatagatatccgaactttttacataaaaaatcaagattatcttttttagggaaagatgatgttttagtgcctataccttacgatatgataaatatatcaaaaatcattgatttcttcatttttgatggggttagttatgctatcaatattaaattattggaggaaagatatggtcttactcaagttatagataacatggtgaatgaggtaacacctaaaattattgagctggagatcgttaataaatctgttctgactgaaccagaacagctttttgatgatatgaaagaggatcgtggcttcatgagaaaattagccagagttcttaaaaatgggatattagaattaaatgtcgatattaatatagttaatgaaataaaagatagttttccaacaataggcaagaatatagaggtggtaaatgataaaaatggaattcaatatataaaattgacaagtaaatcgagaaaaaaagcctttattaggttgctgaatgatgaagcggttcgttctgttctaacgcgaaaaccatcaatagcgcaaaatcataaacctgaaaaaaatgtagctccggcttga

SEQ ID NO: 96936 - DNA, 600 bp, Clostridium sordellii; identical to SEQ ID NO: 96432

SEQ ID NO: 96937 - DNA, 1008 bp, Clostridium sordellii; identical to SEQ ID NO: 96433

SEQ ID NO: 96938 - DNA, 600 bp, Clostridium sordellii; identical to SEQ ID NO: 96432

SEQ ID NO: 96939 - DNA, 1008 bp, Clostridium sordellii; identical to SEQ ID NO: 96433

SEQ ID NO: 96940 - DNA, 600 bp, Clostridium sordellii; identical to SEQ ID NO: 96432

SEQ ID NO: 96941 - DNA, 1008 bp, Clostridium sordellii; identical to SEQ ID NO: 96433

SEQ ID NO: 96942 - DNA, 600 bp, Clostridium sordellii; identical to SEQ ID NO: 96432

SEQ ID NO: 96943 - DNA, 1008 bp, Clostridium sordellii; identical to SEQ ID NO: 96433

SEQ ID NO: 96944 - DNA, 624 bp, Enterobacter cloacae
atgtcatcgtcaagtgaagagctaaagattggggcgaggttgacgctattcttagtgtcttatatgcctttgtttttaataatgacagtaaatcaggtatacaaaaaaaaagatttcttgcattggggaggtatgaataaaaaggcactattattatttgttgaaaattttggtgctgttacagttattttgatgtttgttctttttggttttattggcctttattttttattgaataatattaattcgcgtattgataatgacggggtttttgtaaagatagtcgatatagaaaataaaaatagtgaatcgataagctacctttttacatatttactaccattccttttccaagacctttctgatctcaccagcgtcttttctttggcggttttattactggttacctttatcatttactcaaactcatcaatgattttaataaaccccaccttagctataaaatactccctttatagtattgaatatacaaaggagaacgggccgaaaaagaaagggatgataatttgcagagataaatatttagatgaaggtgattgtataaaaattcaaaaaattggatataaacttttctatgctaaagctcaggagaaaaaacaatga

SEQ ID NO: 96945 - DNA, 1020 bp, Enterobacter cloacae
atgaataacactgatattaaagatattttaaattcacttttgaaggtttatcaatcaaatactttttctatgaattgtttcttaattacaagaaaggttaaaaaggactctgaaatatcctcgcaagaaagattcgaatttaatctgtataaggtcagtcttgataaggatatggtcaatttcttcaagacaggaacatcagatacaattagtaaaatagtgaaaaataataatcttgaattttctaattactcagtaatttctgatgacggtatagatgctgtatacggatatgaggggatggaaaatcttgatttcaatcatgtattagatggagtcaatacagacacaaagtttgaagttttaaaagatcttaaagaaataaaagatgacatcttggctttttgtttgaaagtaagcactcaggatgatagcttccttttatttaggaagttaactaaatcaaaggtagctactgatgcaccattaaataaaatgcaaagagtgcaggctttttttgatgtgaatctttctaaaatgaaagtagttcctatgcaaacggtaagctttgatagcaaggtagatttcttttttataaataaaaaagtgtatattatttcaaagttaggatttgaacaaataattggaatcgagagggagtttatggagaatgctaaaagtgtacttcaagtattatctaatgcatgtgtaattgataatatgcaacttctcgagcaagttattttatctaataagtctcttcttcgaacggttgccaatatagcccaaaagaaaaaccatgaatctttagatgctgctacaataagcaaatatcaagacacacttaaattatttgaagataatatattagaggaaaaaaatggcaggctagtaataaataatgtagatgaagcaaagttgttaataaggttgttaaatgatttttataaacagggcgttgcctctggtaagtattatggaacaaatagcggccatataattgacaagaaagttaattaa

SEQ ID NO: 96946 - DNA, 582 bp, Pseudomonas amygdali pv. photiniae; identical to SEQ ID NO: 95590

SEQ ID NO: 96947 - DNA, 915 bp, Pseudomonas amygdali pv. photiniae
atgcaagtgcactttgatatctttagggattttaactatatagattccacagtgcacttgtggattttcaaaaaaagcaccacagatcgaaaatttaacgctgcatatgtccaaactgatgagaccgtcaataccctgcttaaaaatgtgctgatccacgaggtcaatcgaaccactgaatttgcacaatactcctacctggctcaaacgaatgacaacagttgcttggctgccccagcacttgcaacaaatttttcgctattaaaggtccaggtagaccgcccagagcccgagtgtgccgtaaattccgttgacgacctaaagggtgctcaaggctacgtggtaaaatttactcataatggccaaaccctctatgcagtgaaacgctcaacggcctcatggaaaacttcgtaccctaacaaattcatcaatatggttttcagtaacggcgagctctccgctgccgaggataacggttttactatagaaaaaaactttgacttctactgttcggtagacacattgttgatcacggctaaacgcgcatttgaatcactgatgcaatacaaagaggcttacactcaagcattcacggagttgcaagcagatcccgatttttccaacttattcgctgatattactccccttgtcgagtatatcggaaccaattccacacaattgcgacgcatggctacgattgagcaaaaatccctttattcaaaccctggtttcatgaacagtttgaaacaagttaatgcgctaaggaactggggtttgaactttgaccaaacgaatgataagattatcgtctgcagtgcaacggcacctacgattctacaagttttgttggatcaccgtttgatgagtgaggtcaccagtaatatttatgacgtacctgatgcaattcaaatttga

SEQ ID NO: 96948 - DNA, 582 bp, Pseudomonas amygdali pv. eriobotryae; identical to SEQ ID NO: 95590

SEQ ID NO: 96949 - DNA, 576 bp, Pseudomonas amygdali pv. eriobotryae
gtggtaaaatttactcataatggccaaaccctctatgcagtgaaacgctcaacggcctcatggaaaacttcgtaccctaacaaattcatcaatatggttttcagtaacggcgagctctccgctgccgaggataacggttttactatagaaaaaaactttgacttctactgttcggtagacacattgttgatcacggctaaacgcgcatttgaatcactgatgcaatacaaagaggcttacactcaagcattcacggagttgcaagcagatcccgatttttccaacttattcgctgatattactccccttgtcgagtatatcggaaccaattccacacaattgcgacgcatggctacgattgagcaaaaatccctttattcaaaccctggtttcatgaacagtttgaaacaagttaatgcgctaaggaactggggtttgaactttgaccatacgaatgataagattatcgtctgcagtgcaacggcacctacgattctacaagttttgttggatcaccgcttgatgagtgaggtcaccagtaatatttatgacgtacctgatgcaattcaaatttga

SEQ ID NO: 96950 - DNA, 582 bp, Pseudomonas amygdali pv. lachrymans
atgcagtttaggcttagcgctgcgttcctgattttcattgggtcttatacgccgctggcaatcattctcgcgatccaaaatattccattcgagtggtggtctcgccctatttgcgaactgcctaaattactggcgtttacatgcgccaccaacccatttaaaaatccgttgctcgctattttaatggtcgctttaactgtaagttcggcatttttagcgagccaactcttcaagcggatcgctttcccgcatcgcattgaagtcttatccgttaaagcagtacctaacgaaattatcaactatacatttccctatgtagtgtcattcatgggaataagctactccgaaccggaaaagcttctaggtttcttggtgtttctcctgtggatgtttgccatcacctacaagtctggacaaatcatcatgaatccgcttttgttgattttcggttggaatctttatgaggccaatatccaaatcaatggtgtttcgcgagtggtaaaaatcctgaagagggtatctttccctcctggaaactacaaagcacaaaccgtccaagatttttatatctgcaaggagtag

SEQ ID NO: 96951 - DNA, 915 bp, Pseudomonas amygdali pv. lachrymans
atgcaagtgcactttgatagctttagaaattttaactatatcgattccacggtgcatttgtggattttcaaaaaaagcaccacagatcgaaaattcaacaccgcctatgttcaaactgatgaggctgtcaatacccagcttaaaaatgtgcttatacacgaggttaatcgaaccaccgaatttgcacaatactcctaccttgctcaaacgaatgaaaacagttgcttgtccaccccagcactcgccacaaatttttcgctattaaaagtccaggtagaccgtccagagcctgagtgtgccgtaaagtccgttgccgagttgaagggcgcccaaggctacgtggtaaaatttactcataacggccaaaccctctatgcagtgaaacgctccacggcctcatggaaaacttcgtaccccaaaaaattcatcaatatggttttcaggaacggcgagctctcggctgccgaggataacggctttactatagaaaaaaactttgacttctactgttcagcagacacattgttgatcactgctaaacgcgcattcgaatcactgatgcaatacaaagaggcttacaagcaagctttcacgacgttgcaagccaatgtcgatttttccaacctattcgctgatattgctccccttgttgagtatatcggaaccaattccacgcaattgcgacgcatggctacgattgagcaaaaatccctttattcaaaccctgggtttatgaccagtctaaaacaagttaatgcactaaggaactgggggatgaactttgaccaaacgaatgacaagattatcgtctgcagtgcaacggcacctacgattctacaagtgctgttggatcaccgcttgatgagtgaggtcaccagtaatatttatgacgtacctgatgcaattaaaatttga

SEQ ID NO: 96952 - DNA, 417 bp, Pseudomonas meliae
atgcagtttaggcttagcgctgcgttcctgattttcattgggtcttatacgccgctggcaatcattctcgcgatccaaaatattccattcgagtggtggtctcgccctatttgcgaacttcctaaattactggcgttgacgtgcgctatcaacccatttagaaacccgtcgctcgctattttaatggtcgcttttactgtaagttcggcatttttagcgagccaactctttaaacggatcgccttcccgtatcgcattgaagtcgtatccgttaaagcggtccccaacgaaattatcaactatacatttccctatgtagtgtcattcatgggaataagctactccgaaccggaaaaacttacaggttttttggtgtttctcctgtggatgtttgccatcacctacaagtctgggtaa

SEQ ID NO: 96953 - DNA, 768 bp, Pseudomonas meliae
gtgctgatccacgaggtcaatcgaaccactgaatttgcacaatactcctaccttgctcaaacgaatgacaacagttgcttggctgccccagcacttgcaacaaatttttcgctattaaaggtccaggtagaccgcccagagcccgagtgtgccgtaaattccgttgacgacctaaagggtgctcaaggctacgtggtaaaatttactcataatggccaaaccctctatgcagtgaaacgctcaacggcctcatggaaaacttcgtaccctaacaaattcatcaatatggttttcagtaacggcgagctctccgctgccgaggataacggttttactatagaaaaaaactttgacttctactgttcggtagacacattgttgatcacggctaaacgcgcatttgaatcactgatgcaatacaaagaggcttacactcaagcattcacggagttgcaagcagatcccgatttttccaacttattcgctgatattactccccttgtcgagtatatcggaaccaattccacacaattgcgacgcatggctacgattgagcaaaaatccctttattcaaaccctggtttcatgaacagtttgaaacaagttaatgcgctaaggaactggggtttgaactttgaccaaacgaatgataagattatcgtctgcagtgcaacggcacctacgattctacaagttttgttggatcaccgcttgatgagtgaggtcaccagtaatatttatgacgtacctgatgcaattcaaatttga

SEQ ID NO: 96954 - DNA, 582 bp, Pseudomonas savastanoi pv. nerii; identical to SEQ ID NO: 95590

SEQ ID NO: 96955 - DNA, 915 bp, Pseudomonas savastanoi pv. nerii
atgcaagtacactttgatatctttaggaattttaactatatagattccacagtgcacttgtggattttcaaaaaaagcaccacagatcgaaaatttaacgctgcatatgtccaaactgatgaagccgtcaataccctgcttaaaaatgtgctgatccacgaggtcaatcgaaccactgaatttgcacaatactcctaccttgctcaaacgaatgacaacagttgcttggctgccccagcacttgcaacaaatttttcgctattaaaggtccaggtagaccgcccagagcccgagtgtgccgtaaattccgttgacgacctaaagggtactcaaggctacgtggtaaaatttactcataatggccaaaccctctatgcagtgaaacgctcaacggcctcatggaaaacttcgtaccctaacaaattcatcaatatggttttcagtaacggcgagctcaccgctgccgaggataacggttttactatagaaaaaaactttgacttctattgttcggtagacacattgttgatcacggctaaacgcgcatttgaatcactgatgcaatacaaagaggcttacactcaagcattcacggagttgcaagcagatcccgatttttccaacttattcgctgatattactccccttgtcgagtatatcggaaccaattccacacaattgcgacgcatggctacgattgagcaaaaatccctttattcaaaccctggtttcatgaacagtttgaaacaagttaatgcgctaaggaactggggtttgaactttgaccaaacgaatgataagattatcgtctgcagtgcaacggcacctacgattctacaagttttgttggatcaccgcttgatgagtgaggttaccagtaatatttatgacgtgcctgatgcaattcaaatttga

SEQ ID NO: 96956 - DNA, 582 bp, Pseudomonas syringae pv. helianthi
atgcagtttaggcttagcgctgcgttcctgattttcattgggtcttatacgccgctggcaatcattctcgcgatccaaaatattccattcgagtggtggtctcgccctatttgcgaacttcctaaattactggcgttgacgtgcgctatcaacccatttagaaacccgtcgctcgctattttaatggtcgcttttactgtaagttcggcatttttagcgagccaactctttaaacggatcgccttcccgtatcgcattgaagtcgtatccgttaaagcggtacccaacgaaattatcaactatacatttccctatgtagtgtcattcatgggaataagctactccgaaccggaaaaacttacaggttttttggtgtttctcctgtggatgtttgccataacctacaagtctgggcaaatcatcatgaatccgcttttgttgattttcggttggaatctttatgaggccaatatccaaatcaatggtgtttcgcgagtggtaaaaatcctgaaaaggggatatttccctcctggaaattacaaagcacaaaccatccaagatttttatatctgcaaggagtag

SEQ ID NO: 96957 - DNA, 915 bp, Pseudomonas syringae pv. helianthi
atgcaagtgcactttgatatctttaggaattttaactatatagattccacagtgcacttgtggattttcaaaaaaagcaccacagatcgaaaatttaacgctgcatatgtccaaactgatgagaccgtcaataccctgcttaaaaatgtgctgatccacgaggtcaatcgaaccactgaatttgcacaatactcctaccttgctcaaacgaatgacaacagttgcttggctgccccagcacttgcaacaaatttttcgctattaaaggtccaggtagaccgcccagagcccgagtgtgccgtaaattccgttgacgacctaaagggtgctcaaggctacgtggtaaaatttactcataatggccaaaccctctatgcagtgaaacgctcaacggcctcatggaaaacttcgtaccctaacaaattcatcaatatggttttcagtaacggcgagctctccgctgccgaggataacggttttactatagaaaaaaactttgacttctactgttcggtagacacattgttgatcacggctaaacgcgcatttgaatcactgatgcaatacaaagaggcttacactcaagcattcacggagttgcaagcagatcctgatttttccaacttattcgctgatattactccccttgtcgagtatatcggaaccaattccacacaattgcgacgcatggctacgattgagcaaaaatccctttattcaaaccctggtttcatgaacagtttgaaacaagttaatgcgctaaggaactggggtttgaactttgaccaaacgaatgataagattatcgtctgtagtgcaacggcacctacgattctacaagttttgttggatcaccgcttgatgagtgaggtcaccagtaatatttatgacgtacctgatgcaattcaaatttga

SEQ ID NO: 96958 - DNA, 582 bp, Pseudomonas coronafaciens pv. porri; identical to SEQ ID NO: 96874

SEQ ID NO: 96959 - DNA, 915 bp, Pseudomonas coronafaciens pv. porri; identical to SEQ ID NO: 96875

SEQ ID NO: 96960 - DNA, 582 bp, Pseudomonas amygdali pv. tabaci; identical to SEQ ID NO: 96950

SEQ ID NO: 96961 - DNA, 915 bp, Pseudomonas amygdali pv. tabaci; identical to SEQ ID NO: 96951

SEQ ID NO: 96962 - DNA, 582 bp, Pseudoalteromonas sp. P1-13-1a
atgcagtttaaacttatagcaggatttataatttttttaggttcatatttacctttagcgttaatcctagcagtccaagatattccaatatcatggtggaggaattcattttgtgatttctctaatatagaaaattgttcattcaatccattcactcacccctatttttcaattgttttcattgttgtcactattatttctgtgatcgtttcaaatatttcgttgaaaaaaatagattatcccttcgacggtgaagtaaaaagttcaaaaacaatccctaatgatattataaattatgtatttccttacgtagtttcattcatggggattagttatgacgccccagaaaaattattggggtttatagtgtttttgctgtggatgttcgcgattacttataaatctggacaaataataatgaacccgcttttgttaatgtttggatggaaattatatgaagcaaaaattgaaataaatggccaagcaagggatgtgcgagtactaaagaagggtactttacctcctggtagttataaatttcaatcagttcaagatttttacatttctagggagataaactaa

SEQ ID NO: 96963 - DNA, 915 bp, Pseudoalteromonas sp. P1-13-1a
atggatgctgaatttcaattactaaaagcatttgactttacaaattcgacaccgcatttatgggtttttaaagatagtaggtcacaagaaaaatttagaacgttctatgtccaaacagaaacggatcttaatcgacaatttaaaacgtttgtaaataaggaaatagagagaattacagaacactctccatattcttatattgctcagacaaatgaaaacagttgtttaactttagattctacaacaacaaatttttctaatttgaaagtattagttgatcgtttagaaaccgaacatcgattagatgatagtaaagatctaaaaggtgctaatgggtatgtagttaaatatatatccaatggtgtaaccgtatatgcagtgaagaggtcaactacaagctggaaaacttcatactctagaaaatacattaatatggtattttcgaatggcgagttatctggtgtcgaagatagcagttttgtgattgagaaaaattttgatttctatgtcataaataatgttgcattcatagctaataagcgtgggtttgagtcatcaatgaaatatcgtgaggcatattcacaggcatttactcaactccaagagaacccttcatttagtaatttattttctgatctagagcctatcgttgaatatgttggtactaattcaatgcagttacgccggatgggggttgttgaagaaaaagggatatatactagcccgaattttatagcaaatttgatgacagtaaataccgctagaggttgggggcttaactttgatgaggaaaataatactattattccttgcgctgagacaacaagtacgattctccaagttcttttggaccatcgcttaatgagtgaaataacggcaaacatttatgatgtgccagacgccgtgcaagtgtaa

SEQ ID NO: 96964 - DNA, 357 bp, Rhodobacter capsulatus
atccgctccaggcgcgcccctgccgctgagcgacacaggatcaccacggtggaacctgccgacagagagaacatggcgattatgctcttgtatctcttgccgttgtttacggctgatttcggaaaattgaactggataatgtgggtgcccacgattgcgatcttcgcatttatcgccgttaccagccacagctactttttcaaccccctgctaggtgcgttcggctggcacttctaccgtgtcggtaccccacagaacgtcaccagcatcttaattaccaagcggacgatccgcaaaggtgaccagacgatcaacggtatcgagctgggggactatgtgattctagaaacggagtaa

SEQ ID NO: 96965 - DNA, 807 bp, Rhodobacter capsulatus
ttggaagacggcgtgcagggcgacgtcgaaaggatcttcgacgaacaggaacaatcatttttcctcggtaaagatgaaccgattgagtttaatggcgattggaagccagatgaaaatcagctgctttgcatcactgacagagatcttcttgctcaaatgaatgagacgttggccatcggggcgggggcatacgaccgtttggacatcagcagttatgatacagccggggtcaaagcgctgttcatgcattccgagcagatcaaagggcatattctattgcagaagtttcgcacatcccagtacctgcaacgcaagggtctgacgctggcgtttaacggcaaccagtttggcaaactatcagagcgagggttttcgctggatgaaaggctgggcgctgttgttgacggcgacaccgtaatgtttgtcagcttccacgtgctgcggtctatcttgacggttcaagagcatttcgccgaagcgaccgctcaggaagtcgacgaattcgcacaacacgcatcttttcatatcgagaaccgagccgttttcgacagccacatggatgagcgctgccgaaaattgattcgaggcatcagtaaatcgagagtcctagtcgatcacaatgctgcggagatcatcgctagggcaaaaaccgtaggacttacgctggtggaagacggtggtcgcattgttcttccgtccgtgaagcgcgacctgaaaacggtcctcagcttcttggaggaaagcgtctacaagggagtcttttctgaagaaactttcttgaccaactcaaagcgccccttggcctga

SEQ ID NO: 96966 - DNA, 357 bp, Rhodobacter capsulatus; identical to SEQ ID NO: 96964

SEQ ID NO: 96967 - DNA, 807 bp, Rhodobacter capsulatus; identical to SEQ ID NO: 96965

SEQ ID NO: 96968 - DNA, 606 bp, Leuconostoc lactis
atgagtggttggatgaaatggtcgatgtatgtgatgtcatatttaccattgtacatactaattcttttacaaaatatgactgattttatcaacatgctaaaaaatataagccagtctaagtattcatttcatgataatgcgctcgaattttttgtattttggtttattattattttggtactttgggcactgatcacgtggaaaaatatatattcgaataaagtttctaggaataccaaaattggtacttatgaagatgcgggtgaagggaccttaaattatctggctacgtttatcgtgccgcttatctcgttgaaaataaatgatggcaataccatgattgcaaatctttttttattcatattgttggggaaactttatactatgggagaccttttatatttaaacccagtgttcacgatatttggttttcatattcttagagataaaaacacaaagaaaattatgctaagcaagtattcaataagtcaattacatgaagcagggaagagtaatttgaatcaaattacagtttcgatcctaggttcctcagaaattaatatcatcaaagaaatagttaatcaagaatttgaaaatgatgaataa

SEQ ID NO: 96969 - DNA, 996 bp, Leuconostoc lactis
atggcaatagttaaggatatatttgataaaacacaggcaatttctggatcaaaaagtcatgggaatgtcacactctacttaatgcgttatagacaaaagacaattaaagcagagaaaaatagcaaagttattacatttccgtctttttacgatgcgaagttagacaatgatttgcaggaagaatttgttaaattatttctaaattccagctcatactactctgatttaacatatgattatagtgtgaacgggtctcaagaggacggtgtcgctgttgtacatgagaatgatttcgaaaatgttacaaaatttataggagatttaaaacaaggatccaatgttttggatgatatgtctcaacttaatttggcaagaatcaaggcatatattgttagactatcgtttggcaatgatgacgatttgtatttttttggaagcattaaaaattattcacagttacaaaagaaaagtgttgtgcttcacaaatcaataaataaaagtaaattaaaaaagtttgatatgaatgataccataggttttgatttttacgtaaatatgttttggtacgataatgatttgtatatagcaaacgcaaataaatttgaatctgtattccaaatgtctcgttattataaggaaaaagcagaagaagtattaaatacaattgtgaaatctgattgcgttatggatgatgatatcattgccattaataataaatgtaaagatgattccagaatagctaaaaaagtaatgaaacttaagtttagagaagaccgaattaagagtatttacgaaaacttaaatcaagatatttttgatgaaattacaaatgattctgtcttgaaagataaatacgaattagtcaagtatgagaatggtaaactgacaatggttgataattctgatttaaaaaatattcatgagtatctcaactttattgcggatacagctaaaaggggtatagcctcaaagcaaacaagtagtgaaaatttttaa

SEQ ID NO: 96970 - DNA, 588 bp, Escherichia coli; identical to SEQ ID NO: 95656

SEQ ID NO: 96971 - DNA, 960 bp, Escherichia coli
atgacccctgtgaattttaaaaatcaaatcaccgaaattttcgataatttctcaggtataagaattatctttatagttaaaactgaagataattatgaattaaaattatctaaaatagatgctgaagctttaccaaaaattgttgaaggattcaaaattaggctttacgacgacattgtgacaaatgaggatttaaccattcctctcctttcgaattttgatgatagaaaaaatgccttgtttgcatttgattatgaagaacatccaaaagagtttgattttataaaaaatgcaatagccataccgcctaactctcaggattattatgatttaaataataaatttactgacgtgaaagggataataattcagttaagaggcaacaataagtgtttgtcattgtataagaacaaaacaaacctcatggtttttgagcaaagccgaaaattgtttaacttgataccagacgcagacgggtatttaaaagaattgccaacccaagtgttccgattagattataattatgacttggctcttatagacgacgaattcctgataaaaaatcaaaaaactttagaaataacgatgcagttccatcaggttattgaagttcaagcaacggtggctttggaagcattgaaagcttcattgcttatcgaagatcttactcaccttgagaagagtgcaaaagaaatttctttctcaaggaagcttgccaaaattgccaaacactcacctgtactggggaaaattgatgtgccagagattatcgattatgtaagcaagcatacctatctttcaacagttttaattgtaagtgaagacggcacacaattgctcgtaaaaacaaaagaatcccaaaagcattttattaaactacttagtgatgattatttagagtctccgctcacaaaaatactctatgactcattagctaaagatgaactaaaagcacactga

SEQ ID NO: 96972 - DNA, 636 bp, Escherichia coli; identical to SEQ ID NO: 95762

SEQ ID NO: 96973 - DNA, 1008 bp, Escherichia coli; identical to SEQ ID NO: 95763

SEQ ID NO: 96974 - DNA, 594 bp, Escherichia coli; identical to SEQ ID NO: 95890

SEQ ID NO: 96975 - DNA, 972 bp, Escherichia coli
atgttcactaacattgaaaatattttaaaatcgaaacgcatctctggtgaagctttttttgttgctgatgttcaaggtacgatagatatatttaaggttaaccttgaacctgatgctgaaaaagatctgaccacttcattttctaaaagcttaatcaatattattattgaacctaacagaggtaaagtggcagttccacttgtatccactttattagaaagagataagcaagttttcgaatatgatcacttaacaattaatcacctcccaattgaatttactaaaatgaacaacgtgctaaatttcggtgtcaatgggaatgcaacacagtttgattttgcaacacaaagcctcacatcggtaaaagccgtaatttaccacctttgtgatggtaatggaaacagcgtagtcatttaccaacataaatatcctgtttctctacataagaaaacaaaaaaatctttcttgagtctaaatggcagaaccttagataagatcactcatgacagtattgatataaatgacactattgacttcttcttttttcagaataagtactatgcgctaaacattaagcttcttgaaagaatgtatggattagaaagtgtaatagataatcttgcaaataactcaacgccattaataataaaccttggaattgttaatacacaaggtatgccagtgccactagatattttcaaggatatgtataaagacagagcatttatgcgtagacttgctatggtttcaaaagggaacttagtaaaaacgggagtttcagtccctcaaatacaacaagttatgcaaaaattccctgtatttcaacggaatattgatctaacaggaggattaataaaccttaatactaaagatcaaaagagatattttatccgacttctaaataatgaagcatcttttgcagcacttgataactcgcccttcctggctgttgaaaaagactccgctgcataa

SEQ ID NO: 96976 - DNA, 609 bp, Methylobacterium sp. Leaf88
atgcagctcaggatcctcgtcgcggtcgcgatctaccttgggtcctacctgccgctcggcgtgatcctgctcgcccaggacatcgacgtcgaggccgtgaggcgggggacctgccccatggcgtcgatggtcgccctggagtgcgcgagtccgctcaagaaccccatctggtcgctgtcggcggtggcgatctgcgcgaccggcatggcggtcaccttcctcgcccttcgcctcgtgcgaaccccgcaccgcgtgagggtgacagaaagcaagcacatccccgccgacctcatcaattacgtgatcccctacgtcgtctccttcatcagcctcgaatacgaccagcccctcaagctgatagggtttgccgtgttcctgatctggatcttctggatcacctacaggtccgggcagatcgtcctcaatcccgtcctcgccgcgttcggctggaagttgttcgaggtcaagtacatatacgatggcggcagcaacacctacgtcgggcgtatgctctcgaaggtcgatgtcgagccagagcggagctaccaccaaggtggcctgcaggacgtgatgatcgtgagagacgacgggggggacgaccggggatga

SEQ ID NO: 96977 - DNA, 921 bp, Methylobacterium sp. Leaf88
atgaccacgctcgcggacctgaaggcgttcgacctggcctcggcgggggtctccatctggttgttcaagacggctcccggcggggacggacaccccaggtattcgggacgatgggtcggtatcaccgacgatctcgcgaccaggttgcggggcgccgtcggcacgtgcctcgaaccgatcgccgagaccatcgagtacgacatcctcgcccagaacaacgagggcagcgcactcacgctccaggccgacgagacccatgcgcacctgatctccgccgcggtcgccgatcctacgccggcccgcaaggtccgtgggatacgggatctcgccaacagcgtcttctgcgtggccaagttcgtccacgagggcaagacgctgctggccgtgcgcaagaccgacgcctcttggtccacgcgcaggacgacaggcgtcatcaagatgttcttcaacgacgaggaactggacctcgaagagaaaccgggcttctcgatccgtccggacttcgacttcttcatcctcgacgaccgggtcttcgtcaggagcaagccccatttcgagtcggtgctgtcctataaggcgggccatgaggtcgcgttcgccaggctgaagaaggaacccgatttcgtcggcatcttctccgaactcgggcccctcgacgagtacgtcggcaccaacaagatccacctccgccgcgccgtcgcgatccagcagaaaggtcactacaaagacgcggagttcatgaggaggctgctcgccgagcatgcgaggatgaacctttccatcaccttcgacgacgccggtcggatcgtacccaccgtggaaagcgggcgggacatcttccaggcgctcctcaaccatcgcctggactcccgtctcacccttgagatcttcgacgtgcccagcacggagcgggtgggatga

SEQ ID NO: 96978 - DNA, 603 bp, Rhizobium sp. Leaf306
ttgcagtttaggtttatcgcatcgttgatcgtattccttggctcgtatttcccgctgagcctaattttgcttgctcaggattatcgctacgagttggctatcgctccattttgctggccgatcgatgcggcgaagtgcgtctttccgttcaagaacggcactctcccgcttattctattcggggtttgtcttgcctgtctgttgctgtcgctattgggactgacgactatcaagccgaaggtgcctgttgatatccaggaggtgaaatatgttccctcggagtttatggcatatacgctaccgtacgttgtttcgtttatgagccttgaatatcaagacaccggcaaactcgttggcctcgtcatctttctcggatggatgttcgtcatcacgcatcgatcggggcaactggtattgaacccactgctaatcgtatttgggtggcgcctctatgaggttacgtatttctatcccggaaacgaccaaactcgcaccggttgggctctgtcgaaggacaatatcgagccaaacacgcgcacggacgtggcaaccgtgcaagacacaatgattatcaaggcacgtacgataaaggtttccggctga

SEQ ID NO: 96979 - DNA, 927 bp, Rhizobium sp. Leaf306
atggcggctctcgaagatttgaaggcgttagaccttgcacaagcgcaggtcacattgtggaccgtaaaaggcccgaccggccccgccgccgacaccccgaaatactccgggaggtggatagataccactgaccaggtagacgacgtcctcaaggaaatcctcataggggatctcgctaagacggaagaagtcctggagtacgggctacttgcgcaaaacaacgaagcaagtgcgctcacgatagggttcgatgagacccacgctgaccagctcctcgatgaaattgcagctgaattgccgcagaagaaggcgtcagcggtaaaacacctcctcaacgccaagttttatgtcgcgaagttcattatagggacgcaggtaatttatgccgttcggaaaaccgaggacggatggaaaaccaaacgggcattgaacgtaagggacctctattttgcggatcagcaactagcgctagatgatcgcccccattttcaacttagcaagaactttgattttttcattttcggcggcgagattctggtaaaaaccaaaaatgcgtttgagtcattcctacgctacaaaagtgaccagcgtcaggagttcgtcgggctccaggcagaaccagaatttcttgatatttttttggatgtggcaccgcttgttgcatatgtcggcgacaacaagatccaactccggcgtgccttcgcgatccgcgataagggacattacaaggacccgttgtttatgcagcggctgcgtgacaatcaggctgagtatggcttcgagattcagttcgatcctcaaggaaagattgtagcgaccccggagacgtgcgctcagatcatgaaggcattgctcgatcacaggctcaaatctgggttctcaaccctcatctatgacgtccaggacacgacgccggttcaagtttga

SEQ ID NO: 96980 - DNA, 588 bp, Exiguobacterium sp. Leaf187
atgacactatttatgaagtggggaatgtttattttgtcatatattcctctctattttttgctagcaattcaacacttgaagtataaaaaaattccactgtctgtttcagagttgtcatctgcttggtcggagaatcgagttcaattttgcttttggctagtgcttattatgctctttcttgtctctatttttatgttaataatgtttattagaatatttgctaaaggtggaaattcttttaaaccagattttactttgaaagatgttactaatttacaagataatcaaatgagttatttattaacctatgttgttcctttagcttctatcaacgaaatatctgatggaagatcattattaacaaatttatttttatttattttaattggtaaaatgtatacacaaaacaatttaatatacgtaaatcctgcattttcaattgttggattttcagtgtttcaagcaaataacaaagtctacatttctcgaatctctagagaaaaattaaaacttatcctaattcatgaagaacaaatttatttaagagaattgggatcggatatgtattatttaagtgttaaagattaa

SEQ ID NO: 96981 - DNA, 921 bp, Exiguobacterium sp. Leaf187
atggatattaacggcattattgaatttatcgatcgagctgaaatgagcttttatcttgttgaaaaaaaggcgcgtaaaaacaagccacctacttatgctgtttatacgccaaatattagtgaaataaaacaagatatcgttagtatgtttagaagccatatcatcgagaatcaaatctaccagaatgagcaggttccgtttgatacagttgtggcagaggatgatagacttgaattctgcatagctggtagtactccacatgatgctattgaagcattaatcgaaaattcaattgagaacagaggtaatcatattgatttcagtgcaccaaatgtagatatcaataaattatctttttactgtactaaatttgaagttgaagaagaagaaccgctctatttaatcaggagggtaaataaactttccgctctaaatcgtggttttaaagctcttttttcagataactctttttctaaattaaatgatcaagtattcgctattgatcctatgaatgatttgattattcaaaacgaagaagctctgattttaagcagatttgcactcaatgttctttgtaccatcgacgatttttacattgatgctactaaacagttgctagaatctgttaagtcacatttttcgaattatgacgcttttttagaagactgtcttcaaaatagaagaattcttcgaaaaatggttaaaatgtctgagaaccctgaaagaatttcacttgtactcgatgaaggaagagcggcaattgaatctgtaattgaagaccacgctttgacagtcactcttaacgaagatggattaataaattatagtggtgacgcgactgaaatgactgaaatagcaaatttattgtcagatgcctattttagaagcagtattttaaatgaaaagggaataagtaggtaa

SEQ ID NO: 96982 - DNA, 573 bp, Flavobacterium sp. Leaf359
atgaaaccaaaattattaacagcaatattactttttataagtgcttattcgcccttgttcctgattttggcagtgaaggattttgattttaattgttcatatcattttaaacacccaattgcaatttatactatgctcggcattgctttattgagtgtaatattgttgtttgttacggttgcgtctacgaagaggggtaatatgcctgtaaagataaaatcagttaagaaccgttctgttgatttaatcaattatactatcccttatatagtttcctttttcagttttgatctatctaaaatcgaagatatgatttcattaagtattttcttattattaatgctgttgctaacaatcaaaagtaaatccgtttttatgaatcctatcttgttattagcgggctataacctttatgatttagaatatgagtttgacggcaaaacttgctcaaccatcgtaataagcaaagaggaaatgtatgccgatgaacgtttttacatacgaagcctaaccagatttttatatatagtaatagaaaagaaaaataatgctaatgatgagacagaaatttaa

SEQ ID NO: 96983 - DNA, 942 bp, Flavobacterium sp. Leaf359
atgctaatgatgagacagaaatttaaagcattaaaagaccttgatttacaaaatgctgatgtgtcgttggcaattgttaaggagtataaaaagaatagagaatctaagtatatggttaattacgtacaaattaaccccaatttagaaactcgtttacggaacattgtaactcgtaaaataaattcagcaaatacatttgaagactacacctttgattgtcctgaaccagaagaagaccaagtaagagcaatcaattatgaagaaacagacttttacaggatattcgagcaattacaagatttaaatcctgaagaagacataatagaaaacattgaagaactcgttaaagcaaaagcctatttaattatactacgcaatgaagaaggaattcaggttgtaggatttaagacattacctgaaaactggaaaatgaaacgagaccgaggattaattcctcttctttacagagaaaaccgttttgaagatttagaagaagaaaatgttttcagtatatcttcttttgttgacttgatttattttaatgaagcactttttattctttcaaagaagaattttgagagcggacttaatttccgcaatggaatgttagcaaaagcagatgaattatatcaagaagttcgggaaatcaatctatttgtcaatatagaaattcttacaaatagggttggtaataatcaacgatacctacgaaaaatagctactataaaaaatttggggtattatcaaaacaatgattacttacaacgtctcagattaattagtcaacaaagaaattggggaattgaatttcaagagggacagattgtaattacagaggaaacactagatgctgtacttacgttattacaaaataaaagactgcattcagaattaacggatgaaacttttgatgttgatagcgctaaacgtttagaaatgtag

SEQ ID NO: 96984 - DNA, 573 bp, Methylophilus sp. Leaf416
atgcaactgcattttttatcggcgctagccatttttatcagcggctacgcaccgttgggcctgattctcatcatcaaggacttgaatgaagacacgctctatttcgagcacccgatgcgtgcgctcaccattcttgtgatcttcgcgctcagcgctttatttgccttgagcgcagcgcgcaatatcaggcagggcgtgccggtgaagatttccaaggtatccaataaatccggcgatatgtttacttataccatcccctacatgatgtctttttacaagtttgacctgggtgactggaaattgctgttatgcctgtttatctttttgagcctcatgtttgtgctgtcatatcgtacgcaaaatgtattcgttaacccggtgctggcgctggccggttacgggctgtatgactgccagttcaaggatggcacacaagagaggcagggtctgttgctgtcaaagcagcatttccagattggtgattattgcgcgatcaaacggctttccaatttaatgtactttgtcactcatgtagaagtcacgaaggaagcaggcgaaggagtatctcagtga

SEQ ID NO: 96985 - DNA, 936 bp, Methylophilus sp. Leaf416
gtgacgactaatgtgaaaaacaccttgcaggccctgcgcgccagtgatttcaagcattgggtgaccactttctggctggtgaaaagaaagctcagccagcagcaggcaaaatattcggtgttaaaagtagatactgatgccaaacttgagcaaaagcttaaaaatgcagtcaccgaaaaaatcctcgatcaggactaccagctggatgattacgacttcctaaccgccgaccaggacaaaagcctgttaaccattgcttcgtctgagactgatgtcaccctgattcaggccgagatcgaaaaaggcaccgccaacgccaaagtcgagcaatatgagcaattgctggattcatgggcgatggtgatcaagctcgagcaccaggacaaagccatctatgcctaccgcaaaatcaataaattcaatcatgcagcccgcctgtcgcatgtgtcttttatccagttcaaagaccaggaactgaaagacctggatgaaaaggagatcttcaccatcgatacccaggtggattttttcacttatgacggcacgactttcatcgccaataaaaaagagtttgaaaagacgttgaatttccgcgccggcatggagaaaaaccgagatgtggtgctaaaggaatttgtagacctgaacatattcaacgatgccagcttgctcaaagaacatataggcgccaacctgaattacctgcgcaaggtgtcttcgatccagaaaagtggctactacaaagacgccacattcatggaagaactggtcaaggtcaaccagctgaaaaactggggtctgcaagtcgagaatggcgcgattgtcattaatgaagcttcgatagacctggtactgacattgctgaataacggccgactggaatcgccgatcaaccacgaaatgtttgatgccgccgtcaagaaaaaagtcacttaa

SEQ ID NO: 96986 - DNA, 573 bp, Methylophilus sp. Leaf414
atgcaactgcattttttatcggcgctagccatttttatcagcggttacgcaccgttgggcctgattctcatcatcaaggacttgaatgaagacacgcttcattttgagcatccgatgcgtgcgctcgccatttttgtgatcttcgcactcagcgctttatttgccttgagtgcagcgcgcaatatcaggcagggcgtaccggtgaagatttccaaggtatccaataaatccggcgatatgtttacgtataccatcccctacatgatgtctttttataagtttgacctgggtgactggaaattgctgttatgcctgtttatctttttgagcctgatgtttgtgctttcataccgtacgcaaaatgtgttcgtcaacccggtgctggcgctggccggttacgggctgtatgactgccagttcaaagatggcacgcaagagaggcagggcctgctgttgtcaaaacagcatttccaggtcggtgattattgcgcaatcaaacggctttccaatttaatgtactttgttactcatgtagaagtcacgaaggaagcaggcgaaggagaatctcagtga

SEQ ID NO: 96987 - DNA, 936 bp, Methylophilus sp. Leaf414
gtgacgactaatgtgaaacacagcttacaggccctacgcgccagtgatttcaagcattgggtgaccactttttggctggtgaaaagaaagctcagccagcagcaggcaaaatattcggtgttaaaagtagataccgataccaaactggagcaaaagcttaaaaatgcagtcaccgaaaaaatccttgatcaggactaccagctggatgagtacgacttcctgaccgccgaccaggacaaaagcctgttaaccattgcttcgtctgagaccgatgtcaccctgatccaggccgagattgaaaaaggcaccgccaacgccaaagtcgagcaatatgagcaactgctggattcatgggcgatggtgatcaaactggagcaccaggacaaagccatctatgcctaccgcaaaatcaataaattcaatcatgcagcccgcctgtcgcatgtgtcttttatccagttcaaagaccaggaactgaaagacctggatgaaaaggagatcttcaccattgatacccaggtggatttcttcacttatgacggcacgactttcatcgccaataaaaaagagtttgaaaagacgttgaatttccgcgccggtatggagaaaaaccgcgatgtggtgttaaaggaatttgtagacctgaacatattcaacgatgccagcttgctgaaagaacatataggcgccaacctgaattacctgcgcaaggtgtcttcgatccagaaaagcggctactacaaagacgccacattcatggaagaactggtcaaagtcaaccagctgaaaaactgggggctgcaagtcgagaatggtgcgattgtcatcaatgaagcctcgatagacctggtactgacattgctgaataacggccgactggaatcgccgatcaaccacgaaatgtttgatgctgccgtcaagaaaaaagtcacttaa

SEQ ID NO: 96988 - DNA, 573 bp, Methylophilus sp. Leaf459; identical to SEQ ID NO: 96984

SEQ ID NO: 96989 - DNA, 936 bp, Methylophilus sp. Leaf459; identical to SEQ ID NO: 96985

SEQ ID NO: 96990 - DNA, 582 bp, Lactobacillus salivarius DSM 20555 = ATCC 11741; identical to SEQ ID NO: 95620

SEQ ID NO: 96991 - DNA, 963 bp, Lactobacillus salivarius DSM 20555 = ATCC 11741; identical to SEQ ID NO: 95621

SEQ ID NO: 96992 - DNA, 603 bp, Lactobacillus plantarum
ttgactaggaactcagcaaaaacaaattgtgtaaaatggtctatctttatatcctcttatatacctttgtatttttttattttaataataacaagtgataaattatttagattgtttaggtccaaaaaaaattggtgtgagtatggtagatacttgttgaaaaatagtggagaattattattcatcattgtactagttctagtgataatatattcgttttggactgtacgacaaatattgaatgcatctgctaccaatcacaacatcatagtatgtgatgttaaatcaagtcaagatacaataataagttacatcgctacttatttgctaccgcttactacattagataacggcaatatccgtctaattattgctaacgtggggctgtttttagtgataggatttttgtatgtaaagttaaatttaatctatttaaatcctacatttttgttctttggctatgttccctatttttcaaagtcaaaaattattattagtaatgtttcatatgaaaaacttagaaataatgaacatgaaaaaaagtggaatggtgcgtatattgctaacggtattgtagtaattagaaaagaagataatgaataa

SEQ ID NO: 96993 - DNA, 927 bp, Lactobacillus plantarum
ttggatttaaataaggttttagctattttacgagaccaaacaaccaatattgatttgtatttcaccgagaaatgtcatgacaggtacaatactatggttgcaggaattgccgataatgctgatggagatcagttaaagaatattatgaaggatcttgtggatagaaatgtgactgcgattaatgctgatggtttagaggaagtagcttataatccaacaggatatagagaaggcactgtggaatctgttccggatgattacataagggaaagttataatgaagtaattgaaagttttgaaaatccagaaaatgaaggtttggaagatagtgcagataatcttacattttatacaatgctttttactcgcgacaatgatgttgttaggataatgcgaagagtctcaaaattcaaacgattctattcaaagggaattattgcagccttccatggcaatgagttaaatagaatacaagataaaatgattggcttggatgggtcggttgatattattgattatgatggagaggtattgattctaaatcatattgcacttgaaagaatttttagattagatgaaaagtttgagtcttcggcacgaactatcttgaatagcttaagccataataaaaaaattggaaatttcaataatttagaagaagattgcttaaatgataaaaggatgcaaagaacattaacgaaaatggctgatgagggtattgactggcaacattgtttagatcattttgaaaatgttgttaacattatagatacttttgaattggaaatagatgttattcaaactccggagcagatgttaatgtatgatgataaatcgcagttaatggcttttattagactaattcgtgatgcctattacaaaacaatgataaatgaaagaaatggtattgatcaacatataggatga

SEQ ID NO: 96994 - DNA, 585 bp, Peptoclostridium difficile; identical to SEQ ID NO: 96422

SEQ ID NO: 96995 - DNA, 924 bp, Peptoclostridium difficile; identical to SEQ ID NO: 96423

SEQ ID NO: 96996 - DNA, 597 bp, Salmonella enterica; identical to SEQ ID NO: 95980
  subsp. enterica serovar Hadar str. SA20026260

SEQ ID NO: 96997 - DNA, 978 bp, Salmonella enterica; identical to SEQ ID NO: 95651
  subsp. enterica serovar Hadar str. SA20026260

SEQ ID NO: 96998 - DNA, 576 bp, Pseudomonas aeruginosa
atgagcgacccctccttgcggttacgcccgctggtttctctgctgctgttcttgagtgcatattcccccctgatggttattctggccatcaaggatctcgacctttccagcccttggttttttcacactcccatcaatagcggcatcctgcttctaatggcggttggtagcagtgtcatcacactccgggctgtgaaagagatcgatggcgggcttcctgttgtcattaccaaggcggctaacaagtccggtgatatgttcgggtatacaattccctacatgttgtccttcatgcgcattgatctgggagattggcagacactccttagtctcacggttttcctgagcgttttgttcatcatggcctaccggacgcagactgtgttcatcaatccaatccttgcgatagctggatacatgctgatcgactgcacattcaaacgtgctgaaaaagaaacccaggccatggtgatcacgcgggttccaatcagcataggggattcatgccagttagaacgtctttcgcactatctttatatcgcagcacaaccggagcctaagcagtcagggggataa

SEQ ID NO: 96999 - DNA, 954 bp, Pseudomonas aeruginosa
atgagtactaataaagctaaaaagcagctaaaagagataaagtctttcgacttcagtaagtggtcggtaactttttggttggtcaaaagaaaggttgttcagaaagacgcaaattacagtatgcttcgggtaaatatcgacgcaaaactgcagcggcgcttcaggggatatctaagggcacagcttcagaacaaagaattccatgtttcagaatacgacttcaacaatgcggatggtgacgacgcgctgttcactatttcgacagatatcaccgactttgtgaaggtcgcggcggcgatcgacgatggtttcaacaacccgcacgccaagacctacgaggagctgctcaattcatgggcgtacatcgctttgttcgagaaagacggaaagcgactctttgcctggcggaaaatcaatgctgatacgcagccaaagaaagtgaagtcgaagagcgccacgttcttccaggatcataaactggtagatctcgacgacaaggaaatcttcctgatcgatccccggtacgatttctttgtctatgagggcactaccttcattgccaacaagcggcaattcgaaagctctatgaactttcgagaaggtatgaaggccaacggcgatgaagtactggctgactttgagaagctgaagatctttgacaatgtgggcatcatcaaggagttcgtaggcacgaatctccatcacctcagaaagctctcatccatccgaaagtcgggatactacaagcaacccgactacatgcagaagctgatcagggtcaataccagcgaaaagtgggagctgaagattgtcaagggcaagatcgttgttgagaaagaaaccgttgagttgctgcttaaacttttgaacaatgacagactgcgatctcccattaacaatgagctattcgactccgctgcgaaggcaccggtagccacaggaggtgctgcgtga

SEQ ID NO: 97000 - DNA, 576 bp, Pseudomonas aeruginosa; identical to SEQ ID NO: 96998

SEQ ID NO: 97001 - DNA, 954 bp, Pseudomonas aeruginosa; identical to SEQ ID NO: 96999

SEQ ID NO: 97002 - DNA, 510 bp, Aeromonas hydrophila; identical to SEQ ID NO: 95886

SEQ ID NO: 97003 - DNA, 888 bp, Aeromonas hydrophila; identical to SEQ ID NO: 95887

SEQ ID NO: 97004 - DNA, 516 bp, Klebsiella pneumoniae; identical to SEQ ID NO: 96616

SEQ ID NO: 97005 - DNA, 894 bp, Klebsiella pneumoniae; identical to SEQ ID NO: 96617

SEQ ID NO: 97006 - DNA, 516 bp, Klebsiella pneumoniae; identical to SEQ ID NO: 96616

SEQ ID NO: 97007 - DNA, 894 bp, Klebsiella pneumoniae; identical to SEQ ID NO: 96617

SEQ ID NO: 97008 - DNA, 303 bp, Lactococcus lactis subsp. lactis
atgggatatatcgtgacttacatagttccgcttttatccatgaatataaatagtgcaagaagtctggtaataaatttgctattatttataataattggtacattctatgtcaagaacgatcagatatttatgaatcctatatataatttatttggttataacatattttcagccgaaagtggaatttacataactaagatctctaagcaaaagctgaagcttcttgcaaaaaataatgaaaaagttagaaaaacgaacattttaggagatatctatgtattgaaacaaaacaaagaacgataa

SEQ ID NO: 97009 - DNA, 915 bp, Lactococcus lactis subsp. lactis
atgaatattggaaatgtaagagagtttcttgctggaatcaatcctaacgatatggataatattgatatgagaatgattcaaaaaatgggagaaggtgtagcttcttttgcgcctcagctaagtgtggacatgaaacaagaattgaaggatttttactgtgaagtactcaataatagtttttttgatataagacaagctgaatataatcccaacatcgcaatggaaggaacactacaggtttcaaatttagatactgctcatattagagaagtaattaatgatattgaaagtgaagataattatgtcggtgatatggaagaggttgatttaaataatttaaattattatagttttaaattcactcaagataatgaaagcctctatatttttagacgattcacaaaaatgaaaaaaattaggaatggtatcttggggattttccaagataatagttttaagaaattagaatctaagaatttttttggaatagaccgagatattgatattataatttttgaagaccaagttttaatagtaaatagatttgcattacaaacaatatttaaacttaatgattattttacagaacgaacaatgttagcgttggaaaaactagatcagggagaagtcattgaaaattttaatgactttcaaacagattgtataaatgataaaatggctgcaagaagaatgactaaaattattaatactccaaggagaattgaggactttttgcaacatattgatcaactaccaaatgttatacagcaatttgatttagaaattgaacttagtgaggaaaacaaaattaaatataatggaactaaggaagctcgaagtcaaattttatactgtatttcagatgcttattatcaatcatttattttacaaaggttaggggaagatccctcgtaa

SEQ ID NO: 97010 - DNA, 591 bp, Lactococcus lactis subsp. lactis
ttgaggacgattcaaaaaatagtgttttacatgtcttcatttatgccactatatttattattaatagttcagaactttcattttggggataagaaaagttggttttcattaagcgtgataagaaagcaatttgatttctcaaataaaccagtttcaattttttggtggtttttgataattttgattttgatatctttatttggatgttttatttttttcaaagtttacacctctaaagaaggaaatttggcagatatatcagatgctgaatttgtaagagaagacacaatgggatatatcgtgacttacatagttccacttttatccatgaatataaatagtgcaagaagtctggtaataaatttgctattatttataataattggtacattctatgtcaagaacgatcagatatttatgaatcctatatataatttatttggttataacatattttcagccgaaagtggaatttacataactaagatctctaagcaaaagctgaagcttcttgcaaaaaataatgaaaaagttagaagaacgaacattttaggagatatctatgtattgaaacaaaacaaagaacgataa

SEQ ID NO: 97011 - DNA, 915 bp, Lactococcus lactis subsp. lactis
atgaatattggaaatgtaagagagtttcttgctagtatcaatcctaacgatttggataacattgatatgagaatgattcaaaaaatgggagaaggtgtagcttcttttgcgcctcagctaagtgtgaatatgaaacaagaattgaaggatttttactgtgaagtactcaataatagcttttttgatataaaacaagctgagtacaatcccaacatcgtaatggaaggaacactacaggtttcaagtttagatactgctcatattagagaagtaattaatgatattgaaagcgaagataattatgttggagatatggaagaggttgatttaaataatttaaactattatagttttaaattcactcaagataatcaaagtctttatatttttagacgattcacaaaaatgaaaaaaattaggaatggtatcttggggattttccaagataatagttttaaaaaattagaagcaaaaaagttttttggaatagaccgagatattgatattataatttttgaagaccaagttttaatagtaaatagatttgcattacaaacaatatttaagcttaatgattattttatagaacgaacaacgttagcattggaaaaactagatcagggagaagtcattgaaaattttaatgactttcaaaaagattgtataaatgataaaatggcagcaagaagaatgactaaaattattaatactccaaggaggattgaggactttttggagcatattgatcagctaccaactgttatacagcaattcgatttagaaattgaactcagtgaggaaaataaaattaaatataatggaacaaaggaggctcgaagtcaaattttatactgtatttcagatgcatattatcaatcatttattctacaaaggttaggggaagatccctcgtaa

SEQ ID NO: 97012 - DNA, 702 bp, Bacillus sp. SGD-V-76
atgggggataaagtagaatttatgattaatagagtatttaggtatatgcttttcttaagttcttacttgcctctatttattatcttgttcctaatgaacataaataaccttgtattgtgtctatttatttggttgattatgtcaatcactcttttaactttaaaattatatttagagaaaccattaaaggcaagtcctaattttcgaattaaattagtcatgataaatagtaagggcagtgaagctttaaattatatagtaacttatataattccttttatttcatttaactcaaatattactaacagcgacggagactttaatatcccaacgatatttgcatttatagtgctttttctagtaataggatatctttatatgcataataacctttaccatatcaatccgatattaagtttattctatgatattaatattacacaaggtgaaaatggtgaaaatctaattgtagtatcagaaaaaggaaaagatgtcccgctaaattctaccatatatacgagaaatttatctcctggtgctgtaatgtttgtggatgattccaaaagccggctttcatataaaaaggttgttatttttctaggaagtttcttggtattcttagccctatggaatgagcaaatgaatgattacttatttaaggctatagaatttattaatacaacgataaaaaacctcatttag

SEQ ID NO: 97013 - DNA, 978 bp, Bacillus sp. SGD-V-76
atggaaactaactttaaggttttacaagatattttcgttaattgtactgaaaactattcaattaatggtttgtcagcatttctactttcagatgaagaggaaccttttaaattatataagctgaatatgtccacccatgaagatttaaggacaatcatttgtaagaatctagaaaatgctattgatgctcaattgttcgaatatcacaataatacatcaccagatggtaatgaaagtgtttcgtgtttgaagaaaggtgaagtaccgaactttctagatattgagcaactcatcatagaagataactctactggacttactaagaaggttttcgaagagtcttcaagctctatgaagggatacgttattgatgtgattgtaacaaataataacacaacaaaagaattccatgttcaaatattttcgacactttcaaaatctaacttctataagccgaaaaaaagcttatatagttttggaaatgaagatggtgacctgcttcaaaaagtagaagtatcacacctagagttaaatgaaaaatgttgtgcatttagtattgatgatgagatttttgtaacgcatggctttttctttgaacgcttatttaagtacgaagaacatataaacatgcactccgaggctatcttaggaagtattaatgggagcggcttaatagataactttcttgttttagagtctcattgtaacaggaataagaactttaagaagaagctctttacgataagttctgcgagtaagtttgagaatgttacgtttgagacttttaagaaggtcaaggaagcaatacatgaaggtctattttttagtttggattcagaaaaggaaacaattagcatcgatgaagaaaatagttataagtcagtggaccaaataataaggattattaatgatgaggcagcagaaacattagtaagtgagacaaggatatttgctaaccaaagaataaacataggctaa

SEQ ID NO: 97014 - DNA, 594 bp, Klebsiella pneumoniae; identical to SEQ ID NO: 95974

SEQ ID NO: 97015 - DNA, 972 bp, Klebsiella pneumoniae; identical to SEQ ID NO: 95975

SEQ ID NO: 97016 - DNA, 516 bp, Klebsiella pneumoniae; identical to SEQ ID NO: 96616

SEQ ID NO: 97017 - DNA, 894 bp, Klebsiella pneumoniae; identical to SEQ ID NO: 96617

SEQ ID NO: 97018 - DNA, 516 bp, Proteus mirabilis
atgaataaactagccagattattactaacagcaagttcaattgcaccagtctgtataacccttgctttcattggatttatcaaagactctatgtggcttgtctattcgtccgtgactgtttgtgttttaagctttttttcttgtgtgttttttatacatattgctaagcaacgattatgtgaactaactaaaaacattgattcaatatcaccagctaataaagaggtaacaaactacttcataagctacttgttccctcttttaggcacggattctatctctactgattggaagtatgctctatttttttacgcttctttattattctatatttcattttctgaaaactataatttcaatccgttattatcagtgatgggatataagttttatgaagcagaagatgatactggggtcggttttgttctaatctctaaagacgttattttagatataaagaataaaaaattcacagttgtacaactaactgattacacttacttacatgttggatga

SEQ ID NO: 97019 - DNA, 879 bp, Proteus mirabilis
atgccattatttgctctcatggataaggatgttgctatccctattgttagaatagtcacagataaagctacagataaaaaagttactgaaatatttcaacaacaatttgaatatttcaaaagccattacgaccaagaaatcgagttttatgctgggtattcccctagatataatgagtgtttttttctagatgatttcgatgaagcattacctctaatcgatgctattaatagaaacactgcaatacccaaacttgaccataaaaaaattcctatgtcaggaataaaatgtttatttgtttgtactgcatttccaaacagtccagataaaatagccattcagtcatttaacaaaggccaaatactcaacatagatcgctctctgtggctaagtaaaaaaaccttttccatgatggatggagttggatttaatctagatgataagcttgtcgcagtgatagaaggaaagacgattaaatttaaaagctttcaacgattaagatccatttttgatatggaaaaatattttagtgaagcaactgacgacgatgtgaaatcttttagtcaacattgtaagtttaaaacagaagttggatttgatttactttcagtggcggacactgtcgttagaactaaaattaccttaattaataattcaggcgtattagacattgatttaaaaaaattaaaatctgctgcaaaaaaagttaaatttgacctcaaaacaacaactgatgcatctggggttgaagtgatagctatgccaaccaccaaaaaagaaataaaaaacctattaacattccttgatgaagactattttacttctgagataagtaaaaccatttatagatctaactcaaaaagacctgttaacaaataa

SEQ ID NO: 97020 - DNA, 516 bp, Klebsiella pneumoniae
atgttaaataagcttgccaaatatcttcttactgctagttcagtagctcccgtatttttcaccttagccttcctgtcctatatatcaaagcactacaaattcatgattgcttacctatctctaggtgtaactattcttttattgtgtgttttgatcgtcaagtatgcaataaaccataactctgtcactaataaaaaattaacaaatgcctctcctgccgataaggaaataacaaattactttttaacttatctgtttcccttgattagcgggccagaagctttcatggacgtcaggattgcgtcattttttgctttgagtttgtttttttacatcagcttttcaggctcttacagcttcaacccattgttgtccttttggggatataaatattatgaagctgaagatgatacaggcgtaagctttgttgtattatcaaaaaaaccattgctaaaggcatcaggcaatcgtattaatttgattaagcttactgattacacatacatagcaatatag

SEQ ID NO: 97021 - DNA, 894 bp, Klebsiella pneumoniae
atggaattatttgcaataacagataataccgttggcactcgcattgttaaaattgttactgacagaccaacgcaaaatgtaataactcagttattcaatgaacaaaaaacattttttgaagatcgctatactgaaggagtagagttttcaggtggatatatcacaagcggtgatgagttctttgtaattcctgattttgatgatgttatagctgtattggatgcaattaataaccccacagcaattcccgaatgggaaccagaagatatctctgtattcaatattatcgctcttttttcaggttatcctgaagagaatgaaaaacctgcaatcgccttgattcaaagcttcgataaaagacaagtcattgataatagaagaacaatctttcacaaaccttttcaagcaggtaataccttctgtcagtctgctgagcatggcatcgtcattgataataaactaacagccattctaacaggtacagaattgaaatttaaaagtttccatatgctgcgtaggatattcgatgtggatgcatatttccgagaagccacaaatgaagagttaacaactttttcttcccatgaaaaattttcagttgctcagggatttgatttaacgactattgctgattcagtcattagaaagaaagtttccttgattaacaaatcaagaatacttgaggactactctgtcactgagttaaggatttcagcagctgaaattggtgtcgttttagatactgaaaatgctggcgaatttgagaaaataaaaatgccacaaataaggaaagacgttaaaagattattgcacttcctagatgaagactatttcacctcacatataacaagaacgctgtatcgagcaaactctaaacgtcgagaagatgtataa

SEQ ID NO: 97022 - DNA, 591 bp, Klebsiella pneumoniae; identical to SEQ ID NO: 96138

SEQ ID NO: 97023 - DNA, 960 bp, Klebsiella pneumoniae; identical to SEQ ID NO: 95743

SEQ ID NO: 97024 - DNA, 597 bp, Salmonella enterica subsp. enterica serovar Typhimurium; identical to SEQ ID NO: 95980

SEQ ID NO: 97025 - DNA, 978 bp, Salmonella enterica subsp. enterica serovar Typhimurium; identical to SEQ ID NO: 95651

SEQ ID NO: 97026 - DNA, 519 bp, Pseudoalteromonas sp. 10-33
atgactaaacttgcaaagcttttcttggttttaacttctacggccccaatacttttaacattggcctttgtagagtttttgactaagaaaaactggtcgataatcatacctttagtagtggttgttttgctttttactgtgttttgcttctatgtattgaatcaagcgccaaaaaagctagaagtatttaacattaatagtatctcaatcaaacctgctgataatgaaattgttggctttgttttggcctatttggttccaattctcaatgctagttacaatgaagtaaactttgcgcttatgggctttatatacttgctatttgtagtaatagcatggaatagcaacgcttatcattttaacccgcttttgggtgttcttgggtataacgcgtatgaagttacaactaaagaaaatattacctatgtgctcttaactagaaagacaattagaaaaaacgctgatgtaaattcagtttgtcaactaacacaatatatgctgcttgatataaggaaataa

SEQ ID NO: 97027 - DNA, 879 bp, Pseudoalteromonas sp. 10-33
atgacaactcggaacaatttctttgttttggtaaaagatggaaatgaaatagaagtaaaaaggatagcgcttggtaatgagttgcaagttgagcttacgactatgttttctcaccaagaagctgaatttttgaataatgacactcaagtcataccatttgacggtcagtataagcctgagcacgatgaagtattggcaataggtgggtttgaccttccacaagtattcaaagacgcgattgatagtcctatgacgttggagcctttgcactttaatgaggaaacaaactcgaaaatagttgccgttttctgtggttctaatgatggcgatgaaggttatacagtcttggttcagttgtttgagggtactcgtttaatcaagccaaatatgatgaatattgtgtttggagcaaatgatgaatttcaaaaacttgaatattacgggatgactcttgattccaaattgattgccctctacaaagacaaccaattgcacttcaagtcatatcactttacaaggcgagtatttgacctttccaatcattatagagaagccactaatcaagaggtgttggcacttgctagtcatcaacactttactgcaattgaagaagaagcgttcttgcttatggctgatcatgttgttaggcaaacaatcgcaagaattcaaagaaacgatgtacttgagacattctcagtgcaagacttaagtgcgaaagcaaatgaagttaatttcgatattgaagtgagtgatggtgagatagtcttacccaatgtaaaaaaagaattaaagcttgtgcttagttttcttgatgaccaaatgttcttggggcctataactgggcaaacaagggtatctaattcaagtcgagttatataa

SEQ ID NO: 97028 - DNA, 594 bp, Enterobacter asburiae; identical to SEQ ID NO: 95974

SEQ ID NO: 97029 - DNA, 972 bp, Enterobacter asburiae; identical to SEQ ID NO: 95975

SEQ ID NO: 97030 - DNA, 519 bp, Enterobacter hormaechei subsp. oharae; identical to SEQ ID NO: 96596

SEQ ID NO: 97031 - DNA, 894 bp, Enterobacter hormaechei subsp. oharae; identical to SEQ ID NO: 96079

SEQ ID NO: 97032 - DNA, 603 bp, Enterobacter hormaechei subsp. steigerwaltii; identical to SEQ ID NO: 96086

SEQ ID NO: 97033 - DNA, 957 bp, Enterobacter hormaechei subsp. steigerwaltii; identical to SEQ ID NO: 96087

SEQ ID NO: 97034 - DNA, 603 bp, Enterobacter cloacae; identical to SEQ ID NO: 96028

SEQ ID NO: 97035 - DNA, 915 bp, Enterobacter cloacae; identical to SEQ ID NO: 96029

SEQ ID NO: 97036 - DNA, 636 bp, Enterobacter hormaechei subsp. oharae
atgtatctcttatcaatgttgtttttatttataccgataacaatatatttttctggtattgataacgtatggtctgttttagataaggccatgtcttcgtgttctggcgcggatggaaaatttcaatgcgtactcgactattcaaatagcagattaacattttctgtattgaggtcagtgatctgcggggctttgattttaacttgttcttatacatacatttggtatcgatgggttttgaaaaacttagactccggtgcggtgtcaagaaagttaaaggtcgtttcatgtaaaaaagaatccggtgagtatctttcttttttatcaacgtacataatgccgttggtctttactgatttaagcaaaccatcaaatatagttaattttttgtttgttttgattatcgtcggttttttgcacatcaaaacaaaaagaattcactgcaacccaacattgtcattatttaatgtttctgcctataagattacttacagtgtggtagctaatggaagggaaaaaacgcaagacggtgagttgatagttttatctaaagatttaataaaagaaaatgattttatcagagttataaatcatgatgattatttaacgttcgcgaaaaaaatcatagaggaatga

SEQ ID NO: 97037 - DNA, 1143 bp, Enterobacter hormaechei subsp. oharae
atgagtgacgatgccttagatcttgatgctttggagcataatgaagaaaaagcacaagagcttttagaactgtataagcattttgattgtgatattaacgatgttacattgcacacttactttaactttaaaaataaaggtaaagcgggtgctaaggactcttttagctataaaattgccatccttaaaaatgacagtgagctaaaacagtccattattgataatgtgataaagaaaactatatctgatttagaaaatcgggttgtgatagtatcagatgttaatacactaagtgaccgcaccaacaccatttcatttttaaatgatgctgagcagtatgataatgagcaaatgaagtttctgactggcattgtgtttgatgctgggtttggtggtgatggcaatgaaaatatcccaattgttgattttgacagtgtggatctaatatcaaaagttgactcaatcattttcgttttgagtaagaataatgacgacaattgtataaccatatacaagaagcaatatccagttcaaaacttatcaagaaagaaaaataatttttatgggtttagcaaaaaagaactatctcgagtagatcaagatatgatttctattgatggtaaggcatctcttgtttttgccggcgatacggtatttatctacgaccaaaatgttttcgagcgtttttttggctataaagcatggataaaaaatgctgccactgattttgttaacaatatgtccactcgttttaagggatttgttgacttaagcaaatttattgagcgagtaaataaagatagtcatgatgcggatgctttttctcggaagctagctaaggcgtatgctcgaagcgaaacaaagcaaacgctacaaacaataacaaatgaacatcttaagagtgttctagatgaaaatggatatttagcaggtgttttaaagtataaaaaaggtgatgctacgatttgcatcgcaagccataaccagcaagatacgtttatcgctatggtatccgaaggcgtattgagatcgttgattacaggcattgattatttaagccttgggtcaaagcggaaaatatcgtcagcagcatccaatactactaccagtaccacttcggattcctcttccgctgccgtgtga

SEQ ID NO: 97038 - DNA, 516 bp, Enterobacter asburiae
atgttaaataagcttgccaaatatcttcttactgctagctcagtagctcccgtatttttcaccttagccttcctgtcctatatatcaaagcactacaaattcatgattgcttacctatctctaggtgtaactattcttttattgtgtgttttgatcgtcaagtatgcaataaaccataactctgtcactaataaaaaattaacaaatgcctctcctgccgataaggaaataacaaattactttttaacctatctgtttcccttgattagcgggccagaagctttcatggacgtcaggattgcgtcattttttgctttgagtttgtttttttacatcagcttttcaggctcttacagcttcaacccattgttgtccttttggggatataaatattatgaagctgaagatgatacaggtgtaagctttgttgtattatcaaaaaaaccattgctaaaggcatcaggcaatcgtattaatttgattaagcttactgattacacatacatagcaatatag

SEQ ID NO: 97039 - DNA, 894 bp, Enterobacter asburiae; identical to SEQ ID NO: 97021

SEQ ID NO: 97040 - DNA, 636 bp, Enterobacter hormaechei subsp. oharae; identical to SEQ ID NO: 97036

SEQ ID NO: 97041 - DNA, 1143 bp, Enterobacter hormaechei subsp. oharae; identical to SEQ ID NO: 97037

SEQ ID NO: 97042 - DNA, 603 bp, Enterobacter cloacae; identical to SEQ ID NO: 96028

SEQ ID NO: 97043 - DNA, 915 bp, Enterobacter cloacae; identical to SEQ ID NO: 96029

SEQ ID NO: 97044 - DNA, 597 bp, Salmonella enterica; identical to SEQ ID NO: 95980

SEQ ID NO: 97045 - DNA, 978 bp, Salmonella enterica; identical to SEQ ID NO: 95651

SEQ ID NO: 97046 - DNA, 597 bp, Salmonella enterica; identical to SEQ ID NO: 95980

SEQ ID NO: 97047 - DNA, 978 bp, Salmonella enterica; identical to SEQ ID NO: 95651

SEQ ID NO: 97048 - DNA, 607 bp, Salmonella enterica
aattttttatttttctggtattgatgatgtctggaacgtttttaccaaagctaatggtttttgtgatggcgtcagtaatcgtattgtctgtataacaggtaatatgggcaaccagctatctctatccgtgtcaaggttatgcgtttgtatttttttggtctttttgtgtggctatacttactggtggtataagagacagctttcatttttggatagggggattacctctgccgaagtggttgttgttggatgcgaaaaagagtcaactgagtatctgtcatttttgtcaacttacataatgcccctggtttttacagacttaacaaaaccttcaaatgttttcaatttcatttttattctagttattgtcggatttcttcatataaaaacaagaaggattcatagcaacccaacgctttcattgtttggtgtttctgcttacaaaattgactatataatcagggttgatggtcaggattctgatatcacaaaaggattgattgtcctgtcgaaggatgagatatctgtgaaaagtgtaattcgaatcataaaaaaagaagactacattacattcgcaaaatacataaggaacgattcaaatggctga

SEQ ID NO: 97049 - DNA, 1146 bp, Salmonella enterica; identical to SEQ ID NO: 95993

SEQ ID NO: 97050 - DNA, 597 bp, Salmonella enterica; identical to SEQ ID NO: 95980

SEQ ID NO: 97051 - DNA, 978 bp, Salmonella enterica; identical to SEQ ID NO: 95651

SEQ ID NO: 97052 - DNA, 426 bp, Salmonella enterica
tggtggtataagagacagctttcatttttggatagggggattacctctgccgaagtggttgttgttggatgcgaaaaagagtcaactgagtatctgtcatttttgtcaacttacataatgcccctggtttttacagacttaacaaaaccttcaaatgttttcaatttcatttttattctagttattgtcggatttcttcatataaaaacaagaaggattcatagcaacccaacgctttcattgtttggtgtttctgcttacaaaattgactatataatcagggttgatggtcaggattctgatatcacaaaaggattgattgtcctgtcgaaggatgagatatctgtgaaaagtgtaattcgaatcataaaaaaagaagactacattacattcgcaaaatacataaggaacgattcaaatggctga

SEQ ID NO: 97053 - DNA, 1146 bp, Salmonella enterica; identical to SEQ ID NO: 95993

SEQ ID NO: 97054 - DNA, 597 bp, Salmonella enterica; identical to SEQ ID NO: 95980

SEQ ID NO: 97055 - DNA, 978 bp, Salmonella enterica; identical to SEQ ID NO: 95651

SEQ ID NO: 97056 - DNA, 597 bp, Salmonella enterica; identical to SEQ ID NO: 95980

SEQ ID NO: 97057 - DNA, 978 bp, Salmonella enterica; identical to SEQ ID NO: 95651

SEQ ID NO: 97058 - DNA, 597 bp, Salmonella enterica; identical to SEQ ID NO: 95980

SEQ ID NO: 97059 - DNA, 978 bp, Salmonella enterica; identical to SEQ ID NO: 95651

SEQ ID NO: 97060 - DNA, 597 bp, Salmonella enterica; identical to SEQ ID NO: 95980

SEQ ID NO: 97061 - DNA, 978 bp, Salmonella enterica; identical to SEQ ID NO: 95651

SEQ ID NO: 97062 - DNA, 600 bp, Enterobacter xiangfangensis; identical to SEQ ID NO: 95808

SEQ ID NO: 97063 - DNA, 960 bp, Enterobacter xiangfangensis; identical to SEQ ID NO: 95809

SEQ ID NO: 97064 - DNA, 600 bp, Enterobacter xiangfangensis; identical to SEQ ID NO: 95808

SEQ ID NO: 97065 - DNA, 960 bp, Enterobacter xiangfangensis; identical to SEQ ID NO: 95809

SEQ ID NO: 97066 - DNA, 600 bp, Enterobacter xiangfangensis; identical to SEQ ID NO: 95808

SEQ ID NO: 97067 - DNA, 960 bp, Enterobacter xiangfangensis; identical to SEQ ID NO: 95809

SEQ ID NO: 97068 - DNA, 600 bp, Enterobacter asburiae; identical to SEQ ID NO: 95808

SEQ ID NO: 97069 - DNA, 960 bp, Enterobacter asburiae; identical to SEQ ID NO: 95809

SEQ ID NO: 97070 - DNA, 600 bp, Enterobacter asburiae; identical to SEQ ID NO: 95808

SEQ ID NO: 97071 - DNA, 960 bp, Enterobacter asburiae; identical to SEQ ID NO: 95809

SEQ ID NO: 97072 - DNA, 600 bp, Enterobacter xiangfangensis; identical to SEQ ID NO: 95808

SEQ ID NO: 97073 - DNA, 960 bp, Enterobacter xiangfangensis; identical to SEQ ID NO: 95809

SEQ ID NO: 97074 - DNA, 600 bp, Enterobacter xiangfangensis; identical to SEQ ID NO: 95808

SEQ ID NO: 97075 - DNA, 960 bp, Enterobacter xiangfangensis; identical to SEQ ID NO: 95809

SEQ ID NO: 97076 - DNA, 600 bp, Enterobacter xiangfangensis; identical to SEQ ID NO: 95808

SEQ ID NO: 97077 - DNA, 960 bp, Enterobacter xiangfangensis; identical to SEQ ID NO: 95809

SEQ ID NO: 97078 - DNA, 600 bp, Enterobacter asburiae; identical to SEQ ID NO: 95808

SEQ ID NO: 97079 - DNA, 960 bp, Enterobacter asburiae; identical to SEQ ID NO: 95809

SEQ ID NO: 97080 - DNA, 600 bp, Enterobacter xiangfangensis; identical to SEQ ID NO: 95808

SEQ ID NO: 97081 - DNA, 960 bp, Enterobacter xiangfangensis; identical to SEQ ID NO: 95809

SEQ ID NO: 97082 - DNA, 600 bp, Enterobacter xiangfangensis; identical to SEQ ID NO: 95808

SEQ ID NO: 97083 - DNA, 960 bp, Enterobacter xiangfangensis; identical to SEQ ID NO: 95809

SEQ ID NO: 97084 - DNA, 600 bp, Enterobacter xiangfangensis; identical to SEQ ID NO: 95808

SEQ ID NO: 97085 - DNA, 960 bp, Enterobacter xiangfangensis; identical to SEQ ID NO: 95809

SEQ ID NO: 97086 - DNA, 600 bp, Enterobacter xiangfangensis; identical to SEQ ID NO: 95808

SEQ ID NO: 97087 - DNA, 960 bp, Enterobacter xiangfangensis; identical to SEQ ID NO: 95809

SEQ ID NO: 97088 - DNA, 600 bp, Enterobacter xiangfangensis; identical to SEQ ID NO: 95808

SEQ ID NO: 97089 - DNA, 960 bp, Enterobacter xiangfangensis; identical to SEQ ID NO: 95809

SEQ ID NO: 97090 - DNA, 612 bp, Sphingomonas sanguinis
atgcagctcaggaagacgtctgccttcgccctctacgtgggctcatacctgccgttgtccctggtgttgctggcccaggacatcccgccggcttctctctcgctgccgttctgccgtctcaccgacgtcgtcggcgccagctgcgatctgccgctgatgcattcttggtggtcacttggcatggtcgccgcctgcctcacgtgcctggccatcacgatcatgacgctaagtatggtcacgacgcctcgccggatcgacgtcgcggaggtaaagcacgtgcccgccgacctgataaactacgtcatcccctacatcgtgtcgtttatggggctcgactacgggtcgcccaccaagctgctcggcttcgccgtgcttttcctctggatattctggatcacgtaccgttccggtcagatcgcgatgaacccgctcctcatcgtcttcggctggcggctgttcgagttgaagtacagctatctgcagagcgacgaagcctgggtcggtcgcgcgctatgccggtcggaggtgaatcccaaccggacctacaatcagggcagcctgcaggacgtgatggtcctgcgggacgtggagcagggagggacggatggctga

SEQ ID NO: 97091 - DNA, 918 bp, Sphingomonas sanguinis
atggctgatcttgccgatctgaatgcgttcgacgtcgaaggttcggacctcacggtctgggtatataggcgggcgatgcgggacggacttcctgtcttcaaaggccgctgggtcggcatcaccgacgagctggcctcgtcgttgcgtgccgcggtttcgggcgccatcggcgccgtcgacgagacgatcgcttacgaggttctcgcccagaaccatgagacgagcgtgctgacgctcggtgccgacgagacgcatatcgcgctggtcgaggcgcaggccgccaatccgaccgaggacctcaaggtcaggaagctgagcgagatcgccaactccgacttctacatgcttcgcttcgcgacacagggcggtgtcctgctcgcgttgcgcaagacgaacgcctcgtggagcacgcgccgatcctccggcatcctacgtgtcgtcttcgatgaccaggagctcgacatcgacgagcggccggccttcagcctcgagccgtacttcgacttcttcgtgctgggcaaagacatcttcgtgtcgaacaaggcccggttcgagtcggtcctcgcctaccgggcggggcacgtcgaggccttcgaggaactggtcggggagccggacttcagcggcatcttctcggacatggcagcgatcaccgaattcgtcggtacgaacaagatccacctccggcgggcgatagcgatccgcgagaagggacactttcgcgatgccggcttcatggacaacctgcgcgcgaactgcgccgcgatgggcttggtcattgcgttcgacggggaggggcggatcgtgccgacgccggagacctgccgcgacatcttccaggccctcctcgaccaccgcctggactcaaggctctcgatgcggatctacgacgttcagagcacggagcccgtgggttga

SEQ ID NO: 97092 - DNA, 612 bp, Novosphingobium barchaimii
atgcaacttagaaagatgtccgccttcgccctgtatgtgggctcgtatctgccgctctccttggttcttatggctcaggacatcccggcagcgtctttggcgctcacgttttgccgtcccatcgacatcaccaacgggagttgcgtcttgccactgatgcacccgtggtggtcgctaggtatggtgggcgtaacggccgtttgcttggcaatcacactcacggcgctaaatgtcgttggcacaccacgccgtatcatggtggcagaggtgaagcacattcccgccgatttgataaactatgtaatcccatacatcgtgtcgttcattggcctcgattacggcgagccaactaagttgctgggctttgctgtgctattcctctggatcttttggatcacctaccgatctgggcaaattgcaatgaatccggtgcttatcgtgttcggctggcgtctcttcgagttgaagtatagttatttgcagagtgaggatgaacgggtcgggcgggcactgtgtcaggcggaagttcaccccaataggatctatcagcagggtagcctgcaggacgtgatgattttgcggaagagggggcagagagaaacggatggctga

SEQ ID NO: 97093 - DNA, 918 bp, Novosphingobium barchaimii
atggctgatcttgctgatttaaacgcgtttgacgtagtggaatcggatctcaccgtgtgggtctttaagcgttcgacccggggcgggcttcctgtcttcaaggggcgctgggtcggcatcaccgatgaacttgcggcatcgctacgaaacgcagtggctggcgccatcggcgctgtcgacgagacaatcgtttacgaggttcttgctcaaaaccacgagacaagtgttttgacgcttggtgccgacgagacccacattgcattggtcgaggctcaggccactaatccgaccgaggacctcaaggttaggcagctcagggaaatagcaaactccgacttctatatgctgcgcttcgcgagcgaggacggagttctgctcgccgttcgcaagacgaacgccacttggagcacgcgccgatcatccggcatcctgcgagtggtgttcgacgacgaggaactcgacatcgacgagcggccggctttcagccttgagccgtatttcgacttctttgtgcttggcggcgacattttcgtatcaaacaagacacgcttcgaatccgttcttgcctaccgagcgggacatgtcgacgcgttcgaggcgttggtcggggagccggatttcagcggcatattttccgacatggccgctatcaccgaattcgttggaacgaacaaaattcatctgagacgcgcgatcgctatccgcgagaagggccacttccgggatgcgaacttcatgaacaacctacgtgcgaacggggcggcgatgggtttgactatcggattcgatgggcagggccgtatcgtgccgacgccggagacatgtcgcgacatctttcaagcccttctagatcaccgtttggattcgcgtctgtcgatgcggatgtacgatgtacagagcaccgagccagtgggttga

SEQ ID NO: 97094 - DNA, 429 bp, Salmonella enterica subsp. enterica serovar Agona
tactggtggtataagagacagctttcatttttggatagggggattacctctgccgaagtggttgttgttggatgcgaaaaagagtcaactgagtatctgtcatttttgtcaacttacataatgcccctggtttttacagacttaacaaaaccttcaaatgttttcaatttcatttttattctagttattgtcggatttcttcatataaaaacaagaaggattcatagcaacccaacgctttcattgtttggtgtttctgcttacaaaattgactatataatcagggttgatggtcaggattctgatatcacaaaaggattgattgtcctgtcgaaggatgagatatctgtgaaaagtgtaattcgaatcataaaaaaagaagactacattacattcgcaaaatacataaggaacgattcaaatggctga

SEQ ID NO: 97095 - DNA, 1146 bp, Salmonella enterica subsp. enterica serovar Agona; identical to SEQ ID NO: 95993

SEQ ID NO: 97096 - DNA, 597 bp, Salmonella enterica subsp. enterica serovar Typhimurium; identical to SEQ ID NO: 95980

SEQ ID NO: 97097 - DNA, 978 bp, Salmonella enterica subsp. enterica serovar Typhimurium; identical to SEQ ID NO: 95651

SEQ ID NO: 97098 - DNA, 597 bp, Salmonella enterica subsp. enterica serovar Typhimurium var. 5-; identical to SEQ ID NO: 95980

SEQ ID NO: 97099 - DNA, 978 bp, Salmonella enterica subsp. enterica serovar Typhimurium var. 5-; identical to SEQ ID NO: 95651

SEQ ID NO: 97100 - DNA, 597 bp, Salmonella enterica subsp. enterica serovar Hadar; identical to SEQ ID NO: 95980

SEQ ID NO: 97101 - DNA, 978 bp, Salmonella enterica subsp. enterica serovar Hadar; identical to SEQ ID NO: 95651

SEQ ID NO: 97102 - DNA, 597 bp, Salmonella enterica subsp. enterica serovar Typhimurium; identical to SEQ ID NO: 95980

SEQ ID NO: 97103 - DNA, 978 bp, Salmonella enterica subsp. enterica serovar Typhimurium; identical to SEQ ID NO: 95651

SEQ ID NO: 97104 - DNA, 597 bp, Salmonella enterica subsp. enterica serovar Typhimurium var. 5-; identical to SEQ ID NO: 95980

SEQ ID NO: 97105 - DNA, 978 bp, Salmonella enterica subsp. enterica serovar Typhimurium var. 5-; identical to SEQ ID NO: 95651

SEQ ID NO: 97106 - DNA, 597 bp, Salmonella enterica subsp. enterica serovar Typhimurium var. 5-; identical to SEQ ID NO: 95980

SEQ ID NO: 97107 - DNA, 978 bp, Salmonella enterica subsp. enterica serovar Typhimurium var. 5-; identical to SEQ ID NO: 95651

SEQ ID NO: 97108 - DNA, 645 bp, Salmonella enterica subsp. enterica serovar Agona; identical to SEQ ID NO: 96750

SEQ ID NO: 97109 - DNA, 915 bp, Salmonella enterica subsp. enterica serovar Agona
atggctgaagaaaaactggatttaagcgagctccatcatgacgcgcagaaggcctctgagctctcatcctattactcccacttcgatacaaaggtagaagattttgaccttcatgtatattttaactttaggcataagataaagggcggtgatggaaagtaccgttacgaatatcgggttgcaaaaatagatgatactactgttctgaaagaatcaatcaaagataacgtgataacaaaaacccttaatgatctaagtagcggtggagttgcagtatctgatataaagcagcttagtgatagggctagcactatatcatttttagaagatgcaaagtcatacaaagatgaacagatgtcttttttgacaggtattatttttgataagggatttggaggtgatggggatattcctgtcgtcaattttgagaagtttgataaaatatcaaaggttgactcaattgtttttgtcttaaggaaaggtgataaatgtataacaatatacaaaaaacagtatcctatacagaacctgaccaaacagaaaaatcattacttctcatatagcaaagatacgttatcaaaaatagatgctgacatgatatcaattgatggaaaagcctctattgtttttgttaaaggtactgcatatatctatgatcaggatgtttttgagaaatttttcggatacaagaagtggataaaaaaagttgcgggcgaatttgtttctgaaatgaagcaaaaattttcatcgatagtagactttggaaaagttaccgacaggcttgaaaaagaaagtgctgatgcagatgccttttcaaggaaactggcaagaatatataacaataaagatctaagagcttcctttaatactgttacaccagaaaaaatcagtgattttttagttgaaaatgagtat

SEQ ID NO: 97110 - DNA, 597 bp, Salmonella enterica subsp. enterica serovar Typhimurium var. 5-; identical to SEQ ID NO: 95980

SEQ ID NO: 97111 - DNA, 978 bp, Salmonella enterica subsp. enterica serovar Typhimurium var. 5-; identical to SEQ ID NO: 95651

SEQ ID NO: 97112 - DNA, 597 bp, Salmonella enterica subsp. enterica serovar Typhimurium; identical to SEQ ID NO: 95980

SEQ ID NO: 97113 - DNA, 978 bp, Salmonella enterica subsp. enterica serovar Typhimurium; identical to SEQ ID NO: 95651

SEQ ID NO: 97114 - DNA, 597 bp, Salmonella enterica subsp. enterica serovar Typhimurium var. 5-; identical to SEQ ID NO: 95980

SEQ ID NO: 97115 - DNA, 978 bp, Salmonella enterica subsp. enterica serovar Typhimurium var. 5-; identical to SEQ ID NO: 95651

SEQ ID NO: 97116 - DNA, 597 bp, Salmonella enterica subsp. enterica serovar Typhimurium var. 5-; identical to SEQ ID NO: 95980

SEQ ID NO: 97117 - DNA, 978 bp, Salmonella enterica subsp. enterica serovar Typhimurium var. 5-; identical to SEQ ID NO: 95651

SEQ ID NO: 97118 - DNA, 597 bp, Salmonella enterica subsp. enterica serovar Hadar; identical to SEQ ID NO: 95980

SEQ ID NO: 97119 - DNA, 978 bp, Salmonella enterica subsp. enterica serovar Hadar; identical to SEQ ID NO: 95651

SEQ ID NO: 97120 - DNA, 597 bp, Salmonella enterica subsp. enterica serovar Hadar; identical to SEQ ID NO: 95980

SEQ ID NO: 97121 - DNA, 978 bp, Salmonella enterica subsp. enterica serovar Hadar; identical to SEQ ID NO: 95651

SEQ ID NO: 97122 - DNA, 597 bp, Salmonella enterica subsp. enterica serovar Typhimurium var. 5-; identical to SEQ ID NO: 95980

SEQ ID NO: 97123 - DNA, 978 bp, Salmonella enterica subsp. enterica serovar Typhimurium var. 5-; identical to SEQ ID NO: 95651

SEQ ID NO: 97124 - DNA, 597 bp, Salmonella enterica subsp. enterica serovar Hadar; identical to SEQ ID NO: 95980

SEQ ID NO: 97125 - DNA, 978 bp, Salmonella enterica subsp. enterica serovar Hadar; identical to SEQ ID NO: 95651

SEQ ID NO: 97126 - DNA, 597 bp, Salmonella enterica subsp. enterica serovar Enteritidis; identical to SEQ ID NO: 95980

SEQ ID NO: 97127 - DNA, 978 bp, Salmonella enterica subsp. enterica serovar Enteritidis; identical to SEQ ID NO: 95651

SEQ ID NO: 97128 - DNA, 597 bp, Salmonella enterica subsp. enterica serovar Typhimurium var. 5-; identical to SEQ ID NO: 95980

SEQ ID NO: 97129 - DNA, 978 bp, Salmonella enterica subsp. enterica serovar Typhimurium var. 5-; identical to SEQ ID NO: 95651

SEQ ID NO: 97130 - DNA, 597 bp, Salmonella enterica subsp. enterica serovar Typhimurium; identical to SEQ ID NO: 95980

SEQ ID NO: 97131 - DNA, 978 bp, Salmonella enterica subsp. enterica serovar Typhimurium; identical to SEQ ID NO: 95651

SEQ ID NO: 97132 - DNA, 597 bp, Salmonella enterica subsp. enterica serovar Typhimurium var. 5-; identical to SEQ ID NO: 95980

SEQ ID NO: 97133 - DNA, 978 bp, Salmonella enterica subsp. enterica serovar Typhimurium var. 5-; identical to SEQ ID NO: 95651

SEQ ID NO: 97134 - DNA, 597 bp, Salmonella enterica subsp. enterica serovar Typhimurium var. 5-; identical to SEQ ID NO: 95980

SEQ ID NO: 97135 - DNA, 978 bp, Salmonella enterica subsp. enterica serovar Typhimurium var. 5-; identical to SEQ ID NO: 95651

SEQ ID NO: 97136 - DNA, 597 bp, Salmonella enterica subsp. enterica serovar I 4,5,12:i:-; identical to SEQ ID NO: 95980

SEQ ID NO: 97137 - DNA, 978 bp, Salmonella enterica subsp. enterica serovar I 4,5,12:i:-; identical to SEQ ID NO: 95651

SEQ ID NO: 97138 - DNA, 645 bp, Salmonella enterica subsp. enterica serovar Kentucky; identical to SEQ ID NO: 96750

SEQ ID NO: 97139 - DNA, 1146 bp, Salmonella enterica subsp. enterica serovar Kentucky; identical to SEQ ID NO: 95993

SEQ ID NO: 97140 - DNA, 597 bp, Salmonella enterica subsp. enterica serovar Hadar; identical to SEQ ID NO: 95980

SEQ ID NO: 97141 - DNA, 978 bp, Salmonella enterica subsp. enterica serovar Hadar; identical to SEQ ID NO: 95651

SEQ ID NO: 97142 - DNA, 597 bp, Salmonella enterica subsp. enterica serovar Typhimurium var. 5-; identical to SEQ ID NO: 95980

SEQ ID NO: 97143 - DNA, 978 bp, Salmonella enterica subsp. enterica serovar Typhimurium var. 5-; identical to SEQ ID NO: 95651

SEQ ID NO: 97144 - DNA, 645 bp, Salmonella enterica subsp. enterica serovar Agona; identical to SEQ ID NO: 96750

SEQ ID NO: 97145 - DNA, 1146 bp, Salmonella enterica subsp. enterica serovar Agona; identical to SEQ ID NO: 95993

SEQ ID NO: 97146 - DNA, 597 bp, Salmonella enterica subsp. enterica serovar Typhimurium; identical to SEQ ID NO: 95980

SEQ ID NO: 97147 - DNA, 978 bp, Salmonella enterica subsp. enterica serovar Typhimurium; identical to SEQ ID NO: 95651

SEQ ID NO: 97148 - DNA, 597 bp, Salmonella enterica subsp. enterica serovar Typhimurium var. 5-; identical to SEQ ID NO: 95980

SEQ ID NO: 97149 - DNA, 978 bp, Salmonella enterica subsp. enterica serovar Typhimurium var. 5-; identical to SEQ ID NO: 95651

SEQ ID NO: 97150 - DNA, 579 bp, Thermococcus celericrescens
atggaagagaaaccaacactactcactaggctgtggctcttccttagctcatacatccccctatgggttatactgctaattcagacatatgatgggccaaaaggatttcacacaatattttttggtttgctcagtatattttcactgctatcactacttctctttttaagagtggcaaggcagaaactaaatgttggtaagggtgagaggatttgtgataactttattgtagttgatgaatatcaagatatgaatcatgtgtactttgaatacctggttacttatgttgtctccatgatgtcctttattccaaaagaccagggaatgagaaatattttgacatttctggtgttcatgctcatggtgtttactttttaccttagggcaaacctcatctatgccaatccagtgctgggtgcattagggtataatatgttcagggtaaagaacagggaatcaggtcattgggtattattaataaccagaaaagataaaatactaattgcagataaaactaatccagagaaaatttgtgtgtcaagtctgtcaggtaacatcttcctggaggttgaagactga

SEQ ID NO: 97151 - DNA, 1158 bp, Thermococcus celericrescens
atggatgagcctgaaaagagtagggttcttgcaaggggtcaaacaattataaccctgaagaagtttcattcaaagattaatgaagttgcagatatgacagttgatgtgtaccttgtggagagtactggcaagaaggcaaaagaccccagaacttggttcaggacccataacctgattcttcccaccagttacagaagaaagattgtaaagctgtttaaccaaaaattcttgagggtcattaacaagatatcaaaagatgacactgacttcactaacttctttgattataacagaccattttcaggtggggttgtcaggtatattgaaccacaacatatcccaggatttgaggtgatatggaaccaaataagacaagggggttccaaatcatcaacatcagctaaaggtgtaaagtctattgtggggtatgttcttgatatacagtttaaagatgggggtagagtggcattctttgtgaaaaataggaggtcattcatactcaagaagaacagcatcatggtggggctgtttagaaaacaactgtcactagcaactgatgattacacttctattccattggccattgattcaatttattttgagttcccagatagtgataatgatgggtggttactggtgttgaacaccaggtattttgaatcattcttcaagtactatgagcactacaaacaaatcacccaagaaacaatgtcaaaactcaagggttctggattcattgagtttgaaaatgaggggaaggtcatgaaatatgctctcagtacagttacaatatttaggacactaacccaactacagaagagcaagtttttcagcttcataacagatgatggagttgacacaggttcagaaaggtacaaaaattttgtcaatgacttgctagaccagctggatgttcttagtgcaaaggagagaccaaaccttaaggtaactgaagatgatgaccatatcaggattaagattgaggacaaaaaaggcctgaagcagttcatagaaatttgtcaaagaaagtacatggcaactgttagtaggaggagtggagtggttaggttttatgaggtaaaaggtggagtgagggaacttaagcaactcccccttgatgtatggttaaggacaaagccacagggtgaaactgcatga

SEQ ID NO: 97152 - DNA, 603 bp, Clostridium autoethanogenum DSM 10061; identical to SEQ ID NO: 95996

SEQ ID NO: 97153 - DNA, 906 bp, Clostridium autoethanogenum DSM 10061
atgtttgaactgcaggatgctaaaatggaattagaatgtaaagaagatattagtttgagttgtatatttatatcacaaaattttgagttatctaaagttttaattgaaaaagaactgaaagatgatttaataaaaagttttatagatcggtttttacgtagtactaaagagaaaaaagtagtagaatatgatcctattgtaaagttggatgattgtatagacagtattaatatacaggaaatacctaatttaaataatatgcaagataagtttgatgacatcagcaacataaagttaattgataaatttagtgatatagaaacgagtagagcatatgcgattatattaaataatagaaaaagtaataataaagttatattatttaaaaaatttttatcttctatatatctaaaaagtaaatttaaaattttattaagtgaaggtaaaatgaaaaaaatagacaaagatattttatcattaaataataaatttgattgtgttatgtataaagaagacattgctatattcactcaattatattttgaacaaatatttgattataaagatgaatatacaaaaaaagcaaataaaactatttctaaaattaaaaaattaaatattattgaaaatattgataatatagaaagcgattgtgaaaaaataactataaagaaaaagatgtctaaaattaaggatgaaagcattaactggtttaaagagaaagtagaaagtaatattgaagatattaaaaatattatatctaaggctaatttagatatggaagttagaaatggaaaaataatttcaaatgatacttctgagttaatacacttaattcaagatgattaccttaagtcaaatttatctggtaacaattttgtagcggataaaaaaacaaagatttaa

SEQ ID NO: 97154 - DNA, 594 bp, Enterobacter cloacae subsp. cloacae; identical to SEQ ID NO: 95974

SEQ ID NO: 97155 - DNA, 972 bp, Enterobacter cloacae subsp. cloacae; identical to SEQ ID NO: 95975

SEQ ID NO: 97156 - DNA, 585 bp, Xanthomonas citri pv. citri; identical to SEQ ID NO: 95814

SEQ ID NO: 97157 - DNA, 930 bp, Xanthomonas citri pv. citri; identical to SEQ ID NO: 95555

SEQ ID NO: 97158 - DNA, 585 bp, Xanthomonas citri pv. citri; identical to SEQ ID NO: 95814

SEQ ID NO: 97159 - DNA, 930 bp, Xanthomonas citri pv. citri; identical to SEQ ID NO: 95555

SEQ ID NO: 97160 - DNA, 585 bp, Xanthomonas citri pv. citri; identical to SEQ ID NO: 96352

SEQ ID NO: 97161 - DNA, 930 bp, Xanthomonas citri pv. citri; identical to SEQ ID NO: 95555

SEQ ID NO: 97162 - DNA, 585 bp, Xanthomonas citri pv. citri; identical to SEQ ID NO: 96352

SEQ ID NO: 97163 - DNA, 930 bp, Xanthomonas citri pv. citri; identical to SEQ ID NO: 96357

SEQ ID NO: 97164 - DNA, 585 bp, Xanthomonas citri pv. citri; identical to SEQ ID NO: 95814

SEQ ID NO: 97165 - DNA, 930 bp, Xanthomonas citri pv. citri; identical to SEQ ID NO: 95555

SEQ ID NO: 97166 - DNA, 585 bp, Xanthomonas citri pv. citri; identical to SEQ ID NO: 96352

SEQ ID NO: 97167 - DNA, 930 bp, Xanthomonas citri pv. citri; identical to SEQ ID NO: 96357

SEQ ID NO: 97168 - DNA, 585 bp, Xanthomonas citri pv. citri; identical to SEQ ID NO: 96352

SEQ ID NO: 97169 - DNA, 930 bp, Xanthomonas citri pv. citri; identical to SEQ ID NO: 95555

SEQ ID NO: 97170 - DNA, 585 bp, Xanthomonas citri pv. citri; identical to SEQ ID NO: 96352

SEQ ID NO: 97171 - DNA, 930 bp, Xanthomonas citri pv. citri; identical to SEQ ID NO: 96357

SEQ ID NO: 97172 - DNA, 585 bp, Xanthomonas citri pv. citri; identical to SEQ ID NO: 96352

SEQ ID NO: 97173 - DNA, 930 bp, Xanthomonas citri pv. citri; identical to SEQ ID NO: 96357

SEQ ID NO: 97174 - DNA, 585 bp, Xanthomonas citri pv. citri; identical to SEQ ID NO: 96352

SEQ ID NO: 97175 - DNA, 930 bp, Xanthomonas citri pv. citri; identical to SEQ ID NO: 95555

SEQ ID NO: 97176 - DNA, 585 bp, Xanthomonas citri pv. citri; identical to SEQ ID NO: 96352

SEQ ID NO: 97177 - DNA, 930 bp, Xanthomonas citri pv. citri; identical to SEQ ID NO: 95555

SEQ ID NO: 97178 - DNA, 585 bp, Xanthomonas citri pv. citri; identical to SEQ ID NO: 96352

SEQ ID NO: 97179 - DNA, 930 bp, Xanthomonas citri pv. citri; identical to SEQ ID NO: 96357

SEQ ID NO: 97180 - DNA, 585 bp, Xanthomonas citri pv. citri; identical to SEQ ID NO: 96352

SEQ ID NO: 97181 - DNA, 777 bp, Xanthomonas citri pv. citri; identical to SEQ ID NO: 96365

SEQ ID NO: 97182 - DNA, 585 bp, Xanthomonas citri pv. citri; identical to SEQ ID NO: 95814

SEQ ID NO: 97183 - DNA, 930 bp, Xanthomonas citri pv. citri; identical to SEQ ID NO: 95555

SEQ ID NO: 97184 - DNA, 585 bp, Xanthomonas citri pv. citri; identical to SEQ ID NO: 96352

SEQ ID NO: 97185 - DNA, 930 bp, Xanthomonas citri pv. citri; identical to SEQ ID NO: 95555

SEQ ID NO: 97186 - DNA, 585 bp, Xanthomonas citri pv. citri; identical to SEQ ID NO: 96352

SEQ ID NO: 97187 - DNA, 930 bp, Xanthomonas citri pv. citri; identical to SEQ ID NO: 95555

SEQ ID NO: 97188 - DNA, 522 bp, candidate division TA06 bacterium 32_111
atgtttagtaaatttataagaaaatttattttggctataacttcgctatcaccagtagctattactttttggttcaaagatttttcaaaaaaatttaacctattcgatggatggttttatcttttgatttttttgataattattattatctcgttttttatgattagattagcaaagaaaaagttggaggtaattaaagtgacaattcattcaatccaaaattctgatactgaggttatttcctatatttttgcttacatattaccattcataggttttgatataaaactaacattatttattttgtttttatatttgtttatagtttttacaacaaatatttatcactttaatcccattttaggattattcggttatcactattacacagtttcatttgataatggaactacctttgtacttataacaaaaaaaactttaatgaatgcaaatgagataaacagtgtagttcaattagatgactacactttattagaagtagataaattagaagttaattaa

SEQ ID NO: 97189 - DNA, 933 bp, candidate division TA06 bacterium 32_111
atgaattttgaagcacttatagcaataattaataatagtaaaaataatgatagtacaactaataatagtacaactaataatagtacaaataataatagttcaaatattagaagagtaccaatatcacaggatattcaaaatgaattagaatcgcattataagaatattttgaagaactttttagacgaaaaagataaagtagagtttgatggcaactataaatgtgaagatgatgagatttatgaattagaagattttgattgggaaaaaaagattaaaaattgtgatttaactaaagaagattttaaaaatattattactttaaatataatttctaacgatgatttcgaaaagattaaaatacttattgtatctcaaattgtatctcaagataactacctgatttttcaaagcatggacaatagaaagtttattaaacctaaaagtttcttattttattcaaataatactttaaattatgaagataaaaaaggtataaaaatagacggcaatattgattgtattatcgaattgaactcaaaaagacttttttttacttcttttcataatgcaagtaagatatttgatttatcagattattatagagaagcgactaaaacagagataaatgaattttttagtaatgagattttcgatggtaaaatagaatcagacaatcttacaagtaatattagaaaaaaaatttttcttattcttaaaaatgaaacacttcaaaaagttaataaaaactttcagcaagtaaaaaactatgcagaagaattgggaatcgactgctttaaaaaagataaaattgaacttccaaaagataataaaaaattaaaagaaataataaattttttgaatgaagatctctataaatcaccgatatcaaatgcaatatacgaatctaattcgaaaaaaatgataaaataa

SEQ ID NO: 97190 - DNA, 522 bp, candidate division TA06 bacterium 34_109; identical to SEQ ID NO: 97188

SEQ ID NO: 97191 - DNA, 933 bp, candidate division TA06 bacterium 34_109; identical to SEQ ID NO: 97189

SEQ ID NO: 97192 - DNA, 594 bp, Clostridia bacterium BRH_c25
ttgagaagagtattgctttttatttcttcatatgtgccattgtatgttcttctagttatcaaaaatattttggagcgttgtactagcggaggacgctttgatcttagtatccgcaaatttgaaacagcagtttttttcgatgagataaatgattatgcaatcatgatccttttgttactggctattgtctcagtggtatatttgaaagttcttttgaaacaaccagaaggaactcattattactctattgttggcatcgaggatcagacaggaaatgtatatttcaactatatctccatctacttactgtcatgcttggggttgacgttaagcagtattgttgacgtgtttgttctgatatttttgatgctaattgtcgggtatatctatatcagtaatcatatgacttatatgaatccactgctgcaactcctcggctataaagtatacgagggaacagtacattcggatagtacaaacaaggattttcaatctgttattattgctcccaaaagtcttgtattgcagaaaaatcaaacctattccggaagtggaaaagaagattttatttttctatcccaaactcaagtatga

SEQ ID NO: 97193 - DNA, 975 bp, Clostridia bacterium BRH_c25
atgaaaaaagatgatctaaaaactaaacttaatgcatttaccaaagcaattgcagaagggaaagcggaagtaaatgtaatgctggttgatcaaaacaatcaacggaagcaaaaatatcgtggactgatgttaaaaacaaaacttaacgatattcaatccgtaattgaaaagtcttgtgagtatattgatcaggagcttactaatcgaactctagatatttatgatcttgagatttcagtggatgaatcgactcagatggttaacaaagttgatgtgatatatggtcgggaaattctcgaccagatcaccgtggaatatacagactcaaatacagtgtccgaaaatacagatttgtctcatattaaattcatggtgattcaggtgtataccgataaaaagtccatatatctgttcaaaaaatatgttcagcctacaaccgcatataaaacaacagagaaatatattctatctggaggagttctaaggcctttcaccgatgaagtgattaccatcagttcgctggtagacgctttcctgttggacgatgtatattatgtttttaatcgcaacgccttcaatagtatttttgcgtataaagatgttttcaaaaaaattctggaaaaaaatgcacagatgattgaagacagcggtcttatgacagagactaagcaatttgtggctgattgtgaagcggatgggcgttatcttacacgattgacaaaagcaattttggcaaaaggcttcgaagaagtatcaaaacgcaaggatggcatcaagcaaattgtcaaagatttcgatttgtctctggcactggctgatacaggagaaatcgtttataaaggcaaagaagatattccggaagttctaaatttgttgctgcgacactatgtaatagatgcacttaccagcaataagatgattgcagctgctattcaggaatatcaggcaggcaataaaggaggaattgccgattga

SEQ ID NO: 97194 - DNA, 564 bp, Marinomonas fungiae
atgacaggaaataatgaaggtttgtcgctagctaggctactaatggtcttgagcagtatgtccccactattcattctttgggcaattaaggggtggggaataaaaggtatttcggaagtatattttctttctttctgccttttttttattacggtgccaaatttattcttgtggttccgcgtaagattagtaaaaaaaagaaaagatcggcgagaattgaccgctggcgattgtgaggatcacagagatcatctacttgtttacctttttgctatgttacttcctttctatagtgtcaatatcgatagtattagagacttagcgggtcatgtggcggcaataacgttcattgtatttctgttttggcatctgaatatgcattatatgaacattttttgggccatgaaggggttcagggtatatacgttgaaacctgatgcagaaaataactctattagtggcagaattcctgtcgtattaatcacaaagcgctctcatattgtcaaaggagagaaaatttcagcttacaggcttagccaaacggtatttttagaggatgaataa

SEQ ID NO: 97195 - DNA, 912 bp, Marinomonas fungiae
atgcctattaactttgattttgaaaatgtaaatataactgagtttggtcttggtctggatagtcccaatcgaggttttgtgtttgttcctgttgatgaagtcgtacagaagtcattagttgaaatggttagttttacaaagacactgatgcaggataaggcgagcagtatggctacgtatcagccatcagaaaaatatgcgtctattgaatatcttaccttttcaatcaatgacccattggtacaagagcttaaaaatcttcatgagtccgaaaatgtaccagaagattgcagtgcttttgacaatatcaatcaatgtttcgcgtactttgtaaagctcactgataacaaccaacagagaataacagctgtacgtcgttcaactcagtttaaaactttaataaagaaaaggcataggctggttcagtatgttgataatactttaaagtcgttagaggaaactgtttttaaattggataatgacttcgattttattattcagaatgatttaatacacattctccgccctagtggcctagagtttacagctcaacttcagaaggcaattatggatgcagttccagccaacattgcgagtattgcgagtgaaattgatttcgttaactttgatagtatatctcagtatgcgcaaaaccacccgagagctgcaagatatattgcttccattaaatcccaatcagaagcaataaacatcagtcaagataaactagaacgttactgcgaaaaaaccaatgttgtcacaaatatagttgatgggaagattaacttagacagctcgcagattatgggatttttggaagtcctagacaggcgtcgatacgaaatagatctaaaagacgatggagagtcggaagtttatagagcgccgagcagaagccgagtaactagttag

SEQ ID NO: 97196 - DNA, 639 bp, Clostridium sp. C105KSO14; identical to SEQ ID NO: 95916

SEQ ID NO: 97197 - DNA, 1053 bp, Clostridium sp. C105KSO14; identical to SEQ ID NO: 95917

SEQ ID NO: 97198 - DNA, 519 bp, Enterobacter aerogenes; identical to SEQ ID NO: 95794

SEQ ID NO: 97199 - DNA, 894 bp, Enterobacter aerogenes; identical to SEQ ID NO: 96021

SEQ ID NO: 97200 - DNA, 594 bp, Enterobacter cloacae
atggatagcaggccatatcttaaaacagtactatatatactatcactatggcttctatttttatcattattaattatgtcctacgataaggttttgataaaaaatgtgtgggactatatttttactggaaactttaccttctcaatctcgtcattgaaagtgagaaatatcgttttcatagttagtttgattttcatttttattggtgcaattattttaatagtccttgcaaatagctttggttcgggttggtctgttgcatgcactgtctcggatattagcaatgaaaaccatgaacatttagagtttttaaccacttatataatgcccttagttttcactgatgtcgatagtaagagaactgtattaaatttagggttgatgatatttgtaatcggcgcaatatacgtaaagacgaaccggttttattctaacccatcacttgcaatactcggattcagaatatacaaagctaatgttcatgaccgtggagtgaaaaaatgcacagtaatctgccgcagtgttctaaagagtacagataatataaagtatataaaaatcgacgatgaaacttatttggctaaaatagtgtag

SEQ ID NO: 97201 - DNA, 972 bp, Enterobacter cloacae; identical to SEQ ID NO: 96439

SEQ ID NO: 97202 - DNA, 519 bp, Enterobacter cloacae
atgaacaagttggcgcgattactgctcaccgcaagctccattgctccggtttgcgctacgcttttttttataggtttcgtcaaggaaaccttatggttgatgaattatagtctatatgtaggattggtaagctggctgctggctattgggttaataaaatattctgaatggaaattagaagtattgactaaaaacattaactctttatctcctgctaataaagaggttactaattattttttgagctatcttttcccacttttagggactgattcgattgctgaaaataaatcttatgcagcttttttttacatttcacttcttttttacatttgtttctcagaaaactataattttaacccagtcttatcattgcatgggtacaaattttacgaagccgaagatgatacaggtgtaggattcgttttaatatctaaatcggtaattactgacatccaaaatatttcttttaatgtcgtgcagttaactgactacacgtatctacacgtagaaggatag

SEQ ID NO: 97203 - DNA, 885 bp, Enterobacter cloacae
atggctctttttgctttaatggacaattcaatagctacaaagataatgagggttgaattagataaacccgcaagcacggccgtgaagaccattttccagcaacagaaacttcattttgaatcccaccacagtactgttatcccattttatgcaggatatactcctcgttatgatgaatgctttgaagtgcagaattttgcagcggcctcatcactaattgatgcagtaaaaagaccaacggccataccgatttgggatcccagcattatagacataactaatattaaagcactatttgtcggtgttgatgcgcctgctaatccaaacataattgctttgcaaacctttaataaaaagcaaatcttagatacttcaaaatcttttttagggactttagtaggtaaaaagaccacttttagcaaagctgtcagcactgggttcaacgttgatgataaacttgttgctataattgacactgaccatattttctttaaaagcttctttgttttacgaagtgtttttgacatgactacatacttcgaagctgctacagaccagcaactggataccttttcacaattacctatattttccacccaacatggattcgatcttaaaatcgtcgccgacacagttatcagaaacaaagttacattaataaatcaaacaggattacttaccccgcagaacctgccactattcaaggctgaagctcaaaaagtcaacttcccgcttcaaactacaataaacggaggggttgagacaataacaatgccaatactaaaaaaagagattaaagcgctcctcgactttatcgaggaggatatatggatttcaggtattagtggtcgtagatttaaatcaagttcgaaaaggccaatttaa

SEQ ID NO: 97204 - DNA, 594 bp, Enterobacter cloacae; identical to SEQ ID NO: 95890

SEQ ID NO: 97205 - DNA, 972 bp, Enterobacter cloacae; identical to SEQ ID NO: 95891

SEQ ID NO: 97206 - DNA, 510 bp, Aeromonas hydrophila; identical to SEQ ID NO: 95886

SEQ ID NO: 97207 - DNA, 888 bp, Aeromonas hydrophila; identical to SEQ ID NO: 95887

SEQ ID NO: 97208 - DNA, 615 bp, Escherichia coli; identical to SEQ ID NO: 95636

SEQ ID NO: 97209 - DNA, 1023 bp, Escherichia coli; identical to SEQ ID NO: 95957

SEQ ID NO: 97210 - DNA, 615 bp, Escherichia coli; identical to SEQ ID NO: 95636

SEQ ID NO: 97211 - DNA, 1023 bp, Escherichia coli; identical to SEQ ID NO: 95949

SEQ ID NO: 97212 - DNA, 615 bp, Escherichia coli; identical to SEQ ID NO: 95636

SEQ ID NO: 97213 - DNA, 1023 bp, Escherichia coli; identical to SEQ ID NO: 95949

SEQ ID NO: 97214 - DNA, 615 bp, Escherichia coli; identical to SEQ ID NO: 95636

SEQ ID NO: 97215 - DNA, 1023 bp, Escherichia coli; identical to SEQ ID NO: 95949

SEQ ID NO: 97216 - DNA, 522 bp, Klebsiella pneumoniae subsp. pneumoniae; identical to SEQ ID NO: 96090

SEQ ID NO: 97217 - DNA, 870 bp, Klebsiella pneumoniae subsp. pneumoniae
atgagcctttttgcaatgatgaataaaaactctgctgtgaaagtgtatcgtattgataccgacagacaaacagacatcaaaatcaaaaaaatatttgatgaccaattatctctttttgaaagtcatcacaatacggaacttgttttcgaagccggatatacccctagctataatgaatgtagttatatagataactttgatgaaggaaaaatacttcttgatgcagttcagcgtagcaccgcaatgcctttgtggacaaaaaatgttgggcttaatgatataacagctttttttatggctcctacgtatcctcaggtgaaagacaaaatagcaatccaaaccttttcaaaaaaacagatacttaacgagtcaagatacttatggctcagtaaaaattcatttacgatgtcagatcttttgggtttcaatctagacgataaattagttgcaatccttgaaggagataaaataaagttcaggaacttcaacaacctgagaagcatatttgatatgagttcttattttgctgaagcaacaaagcaagagatttctgactttgtaaaccaaccagtttttaatataccaatggggtttgatcttccagcccttgcagataacgtcataagaaaaaaagtcacattaataaacaaatctaaaatattggtaaatcatactgtaaccgaaataaaaaacgcagcgctaactttgaacttccctataaaaacgaccggctcaggaagctccgagaaaatagaaatgccaacaaataaaaaagaaataaaagagttacttaacttcttggatgaagactatttcaactctgaaataactaagcaaaggtttcgatcaaactcaaaacgtaaagcataa

SEQ ID NO: 97218 - DNA, 588 bp, Burkholderia stagnalis
atgaaaatgcgcttatttcccgcgctgatattgttcctcggctcttacttcccgttgagccttattctgttggtgcaagatgttaaagagacctcttggaagactcacatgtgtcggattgccgagatgttgtcttgtcacttccctgagcttgcgaatcccgagcgggcactaggtctgctcgggatatgcgccgtgagtctcgtcatttttatggttctgatgaggaatctgtcaggctattcaagtcttgatgtcattgactcgaaatcgatcccgaatgatctcatcaactacgtgttcccatacgtcgtttccttcatggggttagatttgggtgttaacgggaaatttttcggatttctgctcttcatcgtactgatgtttctgatcacttttcggtcagggcaaattctgatgaacccgttcttgctgattgctggctggcaactctacgaactcaatatcgtaaccgaagggcgcaagcgctgtgtgaaggcgctatcaaaggagccggttaggtcaggtgatcaccttgaatcttgcttagtacatgggatttatgttttgcatcgaggcgagaaatga

SEQ ID NO: 97219 - DNA, 813 bp, Burkholderia stagnalis
atgagcgatgcattgagggatcagcttaaaggtctggcgagcagttaccaaaccagccatacgatcgccgaggagtacaacctactcagtcagcccagtgagggcggcttccttgctgtttcccgggaaggaacgttgtttcccagtctccaagggctgattgatcagcccttggaggaatgtttggtgaagaacgtgaagcagctgaataacgccgctgggtatgtccttcgcctgcgccacggggaggtggtaatttactgcgtcaagaaagcaagcgcagactgggcgacccgaaaaaagaatggcatgatgaacatcttcttcactgaatcgaggcttgacattatcgatagcccttcattcagcatttcccggagttttgactttttcgttgtgggcgagaacgttctcatgacaaataagcccgcgtttgaatcgcttctaaaccataaggatacttatgaagaagcgtacgcagcactaaagcaggaacctggattttcgggtgccattgtcgatttatcggtttttgatgcgtttatcggaaagaatgctacacacttgcgccgtatggctgtgatcagggctcgcggctactacaagaatgtcgactacatggctcggcttcgagaaattagcgggctccggggttggggcattcagtttgacgatcaaggcagaattgttgctaccccgggaaaaatgcgcgacatcttgcacgttctgctcgaccatcgtcttaggtcggaactatctgacaaccaatacgacgtaccttcgaccacacctgttggccaatcagtgagttga

SEQ ID NO: 97220 - DNA, 519 bp, Burkholderia sp. FL-7-2-10-S1-D7
atgttcggaaaaatagtcaagacgtacttcatcgcgaccgcgctcgctcctgtctgcttctctctgagctacgtcgtaaccttgaagcaaggcttcctgccgtggggtctcgttgcgctcgctaccgcgatcttgctcggtggctcctgcgtcggtatcgtgaacttagcgaagacgcgtctagagaccctccccattacgattaagaaggcaaagtctgctgacaaagacgtcatcggcttctttgtggcttacgtgctcccgctattttttgcgaagtcattaaatttggagccgaccgcgattttcatttttatcgccttactcgccttcgtaatctggggaacacactcaattcaagtaaacccactcctcggaatatttggctaccacttctatgaagtagattcagaaagcggaatctcttttctcctcatcacaaagagaaaaatcgtcaacgtcaaaagcataactgacgtcgcacagctaacagaatatctaatattagacaggagctaa

SEQ ID NO: 97221 - DNA, 918 bp, Burkholderia sp. FL-7-2-10-S1-D7
atgcccgatacccagttaaacctattcgttctgaccgacatcaacgaaaatcgagtaatgcgcgtttccgtcacacaggaactgcagaaatccatcacggaattactcctggaacaagaggaaagattcttttccggaatcgaagaaggcgactattataagtttgatggcaaatatcgccctgaagaacgggaactgctatacatcgacgaattcgacgacatcgacaaactaggcgctgccatagcggacccactgggttaccctgaactcagcatcgaaaacggcgggcttgagcatgtacgcgctgtattctcagggtacacaaaagatgggaaaacacgggtgcttgcgcaagcatttgaccgccgaagaattatcagccccaaaggtttttcgatcatccacagtaaagacaaattcgtaaaattcgatggaaccggactgacgctcgataataaattgactgccgttcttgacggacagaaattacttttttcgagctttcacttcgtcagaacgatttttgatgtgtccgggtatttcaaagaagccacggatgctgatgtcaaggatttctgccgcattgcagaaaaacccgcagaagcccagaaggcatttttggatacgtgtgacggttggattcggcggaagattgggttaatccgacaatctggaatcttagaaaaaacgcccgccgatcaaatttccaaagttgcgaccagctttgatattgagataaaaacgcaagagattgacggaaaaatagttattgaattcccagaaacacgtgccgagttgaagcgactacttaggttcttggacgaagactattaccagtctccattgagcgacgctcgttacatctcaaactcaaagactgtggcaaggcccgcgaagggcgccgcgaaggcatag

SEQ ID NO: 97222 - DNA, 603 bp, Enterobacter cloacae; identical to SEQ ID NO: 96028

SEQ ID NO: 97223 - DNA, 915 bp, Enterobacter cloacae; identical to SEQ ID NO: 96029

SEQ ID NO: 97224 - DNA, 603 bp, Enterobacter cloacae; identical to SEQ ID NO: 96086

SEQ ID NO: 97225 - DNA, 957 bp, Enterobacter cloacae; identical to SEQ ID NO: 96087

SEQ ID NO: 97226 - DNA, 618 bp, Vibrio harveyi
atgatagaaacaaagtcacgtgagacaaacatcaacatttgggtcgagttattgatttttataagctcgtactatcctctgtttcttatattactgatcaaggatgtaacctctaaaactgtcgggattcagtttgggctccctcattgggagttatatgtaagcatttgggccctaatcggtatttttgtatcttctggcgctacgctggtaactggaaagttaatgaggttcctgtttacgggagcagaaggctcaaagcaaataacgcttactgaagcaaaagctgtgcgtggagatatgatcaactacacgctcccttttcttatcggtctatttgcttttgactataaaagcatacaatccattgtatctttggttgtttttttgtccttcatgtttgcattctctcgcaaagataaacttatcttactaaacccaatgttcctgcttctaggtatgcgtttatatgagattaagtataagagagttggtcagcctaaagtagtccattctgctagcgctctttgttggggtgtagcgaaagcatcagatacaagagttagatttctcgaaaactccggaataacgtttatttcagcattagttgataggtaa

SEQ ID NO: 97227 - DNA, 1044 bp, Vibrio harveyi
atgacaattaatcagtcaaacactgcagaggctatgcaagaagaggttcaactaggacttgaccaagctagcttagatgcaaaactctcagaactacaagcactcgatttgtccgaagcaacagttgatttgtgggttgctaaggttaaggttgggaacaaaacgaagcgttttggtgaaattaaaaacttgaatgtacattcggactttcaagaccattttcgtcaatatgttattgaatgtattcgtggtaaccaacatattgaagaacttcgtccaattacaacggtgcaagacaatagattttttcatgtggagtctagcgcaactgatttgtgtcaactgagcgagcaagtagaaactggtaggctacttactgttaatcaagctgccgagctaaataactataatgcttatgctattcaacttacatttggaaaccctgagcaaagcatttatgcattccgctacattaaaggggcttggtcagtaaacaacacggcaaacaaaacgctacgacctaaggtcatgggtaaccaacttgttgttgaaatcgatcaaagctataagttccaaatcaccccttatattgatttcattcaatataaggacgacgtttttattgctgatttggctcaatttgaaacagcaatgaattatcatgaacgtctccgagaaaagaaaactgaagcgattacggctttaggtcaaagtcctgcgatgaattcaagtgagtcaacgaagctgagaagtgtcgttggggatgacaagcgcctaatgcgccaactagcttcagtttaccaaaaaggtcattatggaaatgagctttggttacagaaactacgtgatgcagctaacgaagctggcaactggaaaattaaatttgatgaccatggaaaaatcttagttgaagaaagcaaggattatgtcaaagagctattggttcttctccagaacaagcgtgttaaaactgtagttgatggtttaatgtttgatgttgagggagagcttgtagagatctcaaatttagcttctgaatcgtaa

SEQ ID NO: 97228 - DNA, 519 bp, Klebsiella pneumoniae subsp. pneumoniae; identical to SEQ ID NO: 96664

SEQ ID NO: 97229 - DNA, 870 bp, Klebsiella pneumoniae subsp. pneumoniae
atgagcctttttgcaatgatgaataaaaactctgctgtgaaagtgtatcgtattgataccgacagacaaacagacatcaaaatcaaaaaaatatttgatgaccaattatctctttttgaaagtcatcacaatacggaacttgttttcgaagccggatatacccctagctataatgaatgtagttatatagataactttgatgaaggaaaaatacttcttgatgcagttcagcgtagcaccgcaatgcctttgtggacaaaaaatgttgggcttaatgatataacagctttttttatggctcctgcgtatcctcaagtgaaagacaaaatagcaatccaaaccttttcaaaaaaacagatacttaacgagtcaagatacttatggctcagtaaaaattcatttacgatgtcagatcttttgggtttcaatctagacgataaattagttgcaatccttgaaggagataaaataaagttcaggaacttcaacaacctgagaagcatatttgacatgagttcttattttgctgaagcaacaaagcaagagatttctgactttgtaaaccaaccagtttttaatataccagtggggtttgatcttccagcccttgcagataacgtcataagaaaaaaagtcacattaataaacaaatctaaaatattggtaaatcatactgtaaccgaaataaaaaacgcagcgctaactttgaacttccctataaaaacgaccggctcaggaagctccgagaaaatagaaatgccaacaaataaaaaagaaataaaagagttacttaacttcttggatgaagactatttcaactctgaaataactaagcaaaggtttcgatcaaattcaaaacgtaaagcataa

SEQ ID NO: 97230 - DNA, 579 bp, Burkholderia territorii
atgagccgcctcgttaaggtcggtatgtacctcctgtcgctgtggctgctcttcgtgcttgttattgttaataaggcggatgtcgacgtaaccatctgtctcggttgcgcgttcctgcctcgtccagcgctagcaactttggcactgaaaaaccttctgccactggtttgcgtcgcaatgcttgcagcgtcttctatcttctatgctctctttgttaagatcatatcaggcgcaaaagatggaccgattaaaatcgaagagctagaagacaaaaacgcagagcatcttgtttttcttgcgacctacgttatccctctcgtgggatttagcttggatagcccgaggcagatgataaaccttgccatcacgttgctgttgctcggtgctatctatattaaaacagacctattctacgcaaaccccacgttatccttgctaggcttcaagatattcaatgtaaaagctcagggcaacactgcgatcttgatttccagagaggagattgagattggtgattcggtcaacgtacttcgtctggacaagaaaattttctttgcacgaaaggccacgcgcatctga

SEQ ID NO: 97231 - DNA, 918 bp, Burkholderia territorii
atgaagaccaaacaagaactcaaagaccacctagacgccatcttcgtagatggcgtgaacatgaagctctattttggcctcggggcgggggcggccagagtgtacaagcttgctgactttgatgaccgagccacaaatgcggtgttggcgaactatgctgctagcgttcgtgagttttttgagcgcgacgagttacagaccgtgcttttgtcgcaaatggatcagcgcagcgacgccttggtaatgtacgatctgcaagagcagcctatagagtttgctcagctccaggcgttgcaaaacgaggatgaaccagactttttctcgttcaacgaaaacaacgttggcgaaattcgcagcattgcgataaagattgcgtctgcgcagcagtccgtcgtgttcttcaagacgttctaccctgtttcgcttgtcagacgggatcaaatactgctgtataagctggagaatagattcaccatcttcgatggtgatcttattaaggtaacgccgggatttgatgttctccttgctgatggcgagttttatataaatgatttttcgaaattcgagaaagctttctcgtttacggagatcgcggagcgcgccatgttgtcagttgttcaatcaattctgcagatggggattgtcaatgatgtaaagggctatcttgcggcctgcgtcgcgccgaaacgcgacattctgcgtgccggacaaagtgatgtgctacggttggacgccgccgtgatactcgcttttgcaacgcagaaggcagaaaagatcgggctcaagattgtagacggtcaatttcacctttcttcgcgcgatagcgtgaagaggttttacaaactgctaaacgacgattacttaacgtctgggctgaccgcttttgaatacgagacgctcgctaagaacaagatgtag

SEQ ID NO: 97232 - DNA, 582 bp, Pseudomonas savastanoi pv. nerii; identical to SEQ ID NO: 95590

SEQ ID NO: 97233 - DNA, 915 bp, Pseudomonas savastanoi pv. nerii; identical to SEQ ID NO: 96955

SEQ ID NO: 97234 - DNA, 594 bp, Serratia marcescens
atggggaacttaaaactaaaagtattactttacatattatcactctggttgttgtttttttctctttttataatgtcatgggactctgattttttatctaaagcatactcgcatatactaggggagatggggttttcattttcactttatgaaaaactgaaaacacggaattacgtcttcttgctgagtttgctatttatgtttattggttttttgggttttggttatttttattttaaaacttcagccggttggagcgctactgtaatcgctgacgacgtctcgaatgagaaccatgagcatctagaatttctcacgacatatgttatgcctttggtatttactgatgtaaatagcaaaagaaccgccttgaaccttctggtcatgattattgctattggagctatatatattagaacgaataaattttattccaatccatcacttgcgatattaggttttaaaatttacaaggcgaaaattaaaaatcaaggagataagaaatatattgttatatgtcgaggggtaatatcagatggtacatattttaagtatattaaattagacgatagcacactacttgttaaagcataa

SEQ ID NO: 97235 - DNA, 963 bp, Serratia marcescens
atgttcaactcactaagttcattatgcacatcggcacatacatcgtgcgaaatgttcttcataacaaaatccaataccacatcgcagttagaagttaagaagattgctttagagccttcagcacaggctagtttgacgacgaagttcactaaaaaatttcaagatgacgttattaataaaacatcatcaaatagttcactcaatcctgtatctgctcttttaagtaaaggagatgagatttatgagtacgatatcactccacctgcagaagagtttgttctaattgaacaaattagtcaattcaccgcatcgtctattgtcaagaattttaatttctccactgatagtttttctgacataaaaggtattgttcttaatttgactgacggtaacgatagtttgtttttatatcaacatacatatcaagtatcacttcataaaaaaagtggtctttcctttttgaagtcaatgaatgggaatttattaactgaggttgatcatgacgttattgatgtaaggaaagacttcgactttttttatttcaacggaaaacattatatatgcaaccttaaagtattagaaaatcactatggtttaaactcgattattgacaatatggtaagtttggcaatacctaaaatagtttccttgaatattatcgatgtcagtggaactcctaacccacttgaaatttttgatgatatgaaatcgaatagaagttgtatgaaaaaacttgctaagattcagagcaacaacttgcctgcgataaccattcagcaaataagtgttatactaaatgacttccctaagtttggacgtgaactaagtattaaaaataaccttatcgagctttcatctcaaaagaaaaagttacttttcatacgactgcttaacgacgaggcagtcaggtcagcgttgacaaataatgtatttctggcagatgacagagagtctgcaatataa

SEQ ID NO: 97236 - DNA, 582 bp, Agrobacterium vitis
atgagtgtgggggtaaatgaagggcttggcctggttcgctttatcttggtttggtcaagcctgagccctgtttttctgctttgggccattcggggagttgaggcggtcgaggatgttatttgggttccgatctgcctgatacttttcttgctccctaccctgattctctactggtatttcagacgggcaagaaagaacgagaacgtcaaaacaattagcgtttgcacatcaaaggatcaacgagagcatctgttaacctatcttttcgcgatgctgatacctttgttcgatgcaaatctcggagggcttcgcgagatcgttgcgatatcaatcgccttcctcttcatcatgtttctattctggcacatgcgacttcattacatgaatttgatcttcgcaatatggggctatcggatattcacagtcgaggcaaagctgggaacaacagaaaaagaccggcatgcagatcggttgattacttatgcgatcatatcgcgtcgacattatttgcccgaaggtgaagcattgactggttatcgactgggaggaaacgtattggtggatagggcaatagatgattga

SEQ ID NO: 97237 - DNA, 918 bp, Agrobacterium vitis
atgattgatcaggaattcgatgcggctgctatagcctctgtaaatttcggagtgcgtcttcgcagcaacggaaatatgcattttgtgccaaccgacggccccaccaaggacgcattgaaggaaatttttcgcgataccatcgcgatcttcaatagtattccaaccggctgggagctgcatgatatttccgaagactatggaaatccgcgccgcatttatgcggcgcgcgcgggcgaattcatggctgaattgtcgtcggtattcgatgcgggagcgctggcggatctaaccaacctccatgaccatgctcacgatgttgaattttatttttgcgagttcaccgacgcccagcaaaggcgcgccgtagcgatcaagaaagggacgcgactgaaagggacacttagtgcgcgcaaccggctcatgcggctcgttgacgatacgcttgtcttgatcgaagaggaagtattacgcctggatcaggaattcgatgtcatcgtcacagatccgcatgttttcatcctgaatgtgcgcgctgtggaacagatcgccaagatcgtggagcatgtggcggcgaccgccgccgttaaggtgcaggcgattcatgatgcaattccatttctcgacctttcgcggattagggacaagatcagccgacatccgcgaatggcaagaaacgctgcgtctatcgccgcacatccgaatctagcaaagtttcagcggccattcattgaaacaatggcagctaagcacggcattaagttccaggaacttgaggacggacgccttcagtgccgtgtcacagatgaagccaagctactcgaactgctcgatgcaaggcgttatcatctcgatttggcgggcgatggtggagatccattcagagcttccggacgacagaaagtatcagcgtcggggtga

SEQ ID NO: 97238 - DNA, 537 bp, Pseudomonas fluorescens
atgctaggtaaacctactcgagtgcttttagcgctcacagcgattgcaccggtttcggtatcgctggcatacgtttttggcgcacgaaagggtgagtggttgctttgtgtgctggcgatctgcgtctgcctcatcctcggaattatatctagttggattatcactgaagcctcagcccaatttgagagacttcctgttgtaataaagaaggttaagagtgctgacaaagaagttgtaggcttcttcgtggcttatgcacttcctttgatatttaagggagaggctggtttagactttggcgcttggatgcttgcgggggggatgctgatatttgtgctctggacgactcatgctttgcatgtgaatcccgtgctgggtcttcttgggtttcacttttatgaagttgagactcaagagggtgtgacgtatttgatgctaacgaaaagaacaattaataacgtctccagtattaaaagcgtagttcagcttacggagtacggtattttggaagcaaaaactaaggaaaaaacaaaatga

SEQ ID NO: 97239 - DNA, 864 bp, Pseudomonas fluorescens
atgaatttgtttgcactaatggatgtggctggagctagactgattcgctttccactgtcggtggatttaagcgccgatatttctactgtttttaacgatcaacatacagagttttttcggggtgttgatactataataccatttgatggtagatatactccagaggaaggcgagcttcttgaaattcctgacttcgcagatgtcgacggcctattagctgccgttgcaaacccactgtctgttgatcagtatgatcccaaaactcacagccttgacttagtacgagcgatttttactggaatagaggtagctggcgtacctcgggttctgatgcagatttttgaacgccgcagactgattgcccgtgcagggttaatgctattttttgcaaataatcaatttcaaaaaatgagtgagtcgggactgtctctcgacactaagctcttagctgtgctcgagggtactaatttaaaatttcaaagctttcactttgctaagcgcgtattcgatctttcggaatactttcgagaggcgactaacgaagaagtgactacttttgctggtcatgaaaagttggcggttcaagatgtgcaagtttttttggctgccgcaggtccgcaaatcagaaagaaaatatcactcatccggcagtcggcggttcttgagaactacagcacagatcaaattgttgccgttgcagcgagtatgcaatttccattagctctgtcagatgacggacgcattatcgttcctgataataatactgagctaaggaaattgctgcgttttttagatgaggattactacgagtcccctctatctaatactagatttatttctaactcaaagcgcaaagctgattga

SEQ ID NO: 97240 - DNA, 543 bp, Aerococcus sanguinicola
atgaaccttttgtttaggatccttttatatatatcatcatatcttccacttgttgttttgattttcattcaaaatatgtatgatttaacttggaaagctgcctataagacactagtaaacaatatttttttttggaaagtagtatttttagcagtattattttcaagtatggcattaatattctggttaattgctataaaaaaggaaagtgcatctgatggcaggaaatatagtgttgataatttgaaagaaattgatgtagaagtactgaattattttgtaacctacatagtacctttgttatcattagatatatcttctaaaactagtatactagttaattttctgtttattgtattattaggaatatatttcgtaaggaataatgctctccattttaatattatgttaattttattaggataccatatatacacgaatgataaagatcatattattatttctaaaagaacattatatgaaataaaaaataacgctctcaaagctgatcaaataggtactagtcaaattttttacatttaa

SEQ ID NO: 97241 - DNA, 885 bp, Aerococcus sanguinicola
atgaatttagacacagtggtaaatcagattcgaaattcaaatattattcatctccatatgtgtcaaaagaatcctcaaggatacgtaacttttacaccaaatatcacagatcaggttaaaaatgagcttaagagaatatcaattgattatcttgagactaaagcaaacattaagcaagtcgaatataacccaacaagaactatttcaggaacagttgaaaccgttaaattccaagattttgattcagttactgaattttttgaaacttttaaagaagaggctggaattggtgaaataacacctattcttatagattttttcatatatgaatttgaaattcaagataaaagtatttatctctttaggagacacaataagaataaggcacttagaaaaggtatacttggtaaaatattaaaaggctattataagagtattgaaaccgaggatatattaacaatagatgataaaattgattttttagtatacgaaaatgagattattgtattttatcatactgcttttgagagaatatttaatttagatgccgaattttacgataaagctgaaattgtattggaagcagatatgtttaaaaataaaataattggatatgatgctttaaaagaagatcttctggataataaaaatttggttaaaagagtttcaaaattagaaggtgatatagataaagccactatgtttttaaagcatatgcgtagaacggaggctgtaataaatcgttttgatttaccgatttctataattggggatcaaatttgttacgaagataagagtcagttaggagaaattgtacttttgatgcaggatgcatattacagaacttttattggagaggaagacggagtagacgaagggagataa

SEQ ID NO: 97242 - DNA, 582 bp, Aggregatibacter actinomycetemcomitans NUM4039; identical to SEQ ID NO: 95710

SEQ ID NO: 97243 - DNA, 942 bp, Aggregatibacter actinomycetemcomitans NUM4039; identical to SEQ ID NO: 95713

SEQ ID NO: 97244 - DNA, 603 bp, Klebsiella oxytoca
gtgaatgccgaatcgagaaaaaataaggagcaaataagaagaaaggtggacttatatattttatcccttgctattttatttgtgttttttatcttcattacatgtaagtttccggtatgtttttcatcacaatgtaagtttattgggtgggaggtgctattaaaaaataacatagtgcctgctatatgtattatcttgttgttatattcgtttttcgcctattacagatttaaatatgacactaaaaaatctgttgagcttccggttaaaatagtcaagttagagaaaataaactacgaacatttaacatttctggctacatatattattccattaataacttttgattttgagaaagaaagatacatattagttttagccgctttattggttattatgggtgtaatttatataaaaacagatcttttttatgcaaacccatctctcgcattattaggttttaatatttataaggtcgatatcaatatctctggaaatgttataagggagggtgtaatcgttataacacgcagaaaattagaagcgggtaaaatgttcagctatattgtactggatgaccgggtttattattctggcaattga

SEQ ID NO: 97245 - DNA, 975 bp, Klebsiella oxytoca; identical to SEQ ID NO: 96199

SEQ ID NO: 97246 - DNA, 522 bp, Sphingobium sp. AM
atgctgaacgcattcgctcgcatcctgctcaccagctcggctatcgcgcccgtggggctgacctatgcctggatcgcctacatgcaggatcagccaaagccggcgatctacattcttgcggctagcctcgctaccgtgggcatctgtctgatgctgcttcggtatgcgcgtaagaacctcgaagcgtctcagtttcaagcggtcgaaatcgaagcggcagaccgtgagaatatgggatttcttctgctatatttgcttccgctttttacatctcagttcaacaccctcaactggcaactgtggattccaaccctcgttattttcgcgctgataacggcgactggatacaactatcacttcaacccgcttctcggattgttaaagtggcacttctacaaggttcagtcaaaagagggtgttacctatgttcttataacaaagaagcagcttcgaacggtagctaatgccgttactgtcgggcagcttaccgagtacattctaatagacttagaggatgcttga

SEQ ID NO: 97247 - DNA, 867 bp, Sphingobium sp. AM
atggtcaatctattcgccctttgtcgcttaacaacagggttgcaggttaagcgggttgcgctcgctcaaccggtgcaggcgaaggttggtcatatctttcagacacaggcgaattatttcctgaacggcgtcgctgaggaggtcgatttctcgggcgattggaaaccggatgacgacgagctgctggtgattgacgctcccgctgaggcggccgtcatcactgcaacaatcgcggccaatccgatcagtctgccggagatcgacgcccagaacttcatggcagagggtattcgaggcctcttcgtgatcgatccggtaggacagggtcatcgtgtcctgatccaagccttttcggcgcagcagcttctatcccgcaggtttaccctcttccagtcgggcaattcgttcaaggagctgacggagccgggattcaccctcgacaacagtatcgttgccatcatggaaggaggaaagctgaagttcaaaagctttcagcggacgcgcagcgtgtttgacctacagcagttctataaggcggcaaccgatcaggaggtggatgctttttgccagcatgccagcctagaggtagccgacgttgctgcgttcaaggtggcggcggaccaaggcgtcagaaagctcgtacatgccatcactaaggccaatgtgttgaacacacatcaggtagatgtgattgcgacgaaggcagcaagcctgggaattaatataaccgtgcagaatggaaagcttctggttcctactgatcggaaatctataaaaacgctttttcggtttttggacgacggcatctatcaagccgcgctcagcgcatcgagatatgttaccaactcaaaaagaagaatcccctag

SEQ ID NO: 97248 - DNA, 588 bp, Vibrio parahaemolyticus; identical to SEQ ID NO: 96174

SEQ ID NO: 97249 - DNA, 987 bp, Vibrio parahaemolyticus; identical to SEQ ID NO: 96409

SEQ ID NO: 97250 - DNA, 519 bp, Escherichia coli; identical to SEQ ID NO: 95748

SEQ ID NO: 97251 - DNA, 885 bp, Escherichia coli
atggcactttttgcagtaatagataatacaattgcaacgagaattgttagagtcgaacttgatgcaacagcaagtacttctgttacggccattttccaacaacagcgtcaatattttgaaagtcatcataacaatatgataccattctatgccggttatacaccaaaacatagtgagtgttttgaaatacaaaactttactgattctgcacgcctgattgacgcagtcaataggcctaccgccgtgcctgtctgggatcccagccaaattgatattggttatattaaagcattatttgttggtgttgacgcgccagcaaaccccaatattattgcgctacaaaccttcaacaaaaaacaaatcttagatacctcaaaatcattctttggaaagttttttgcaagcaaaactacctttagtaaagctaatagcatcggttttaatgttgatgataaactagttgcaataattatcaatgatacaatacgatttaagagtttctttaatctaagaagcatttttgacatgtcgtcctatttttctgctgctactgaccaagaacttaatgcatttagtcaacttagtgtattttctactccccaaggttttgatctaaaatccgttgcagatacagtgataagaaataaagtaacactaataaatcagactgggatgctaacaccccaaaatatgtcaaagtttaaatccgaagctgctaaagtcaatttccccttacaaaccataatagttggcggtgttgagaaaattgtcatgccttcatcaaaaaaagaaataaaagcccttcttgactttcttgaggaagacatttggatttcagggataagtggaagacgctttaaatcgaattcaaagcgcccaatataa

SEQ ID NO: 97252 - DNA, 612 bp, Listeria monocytogenes; identical to SEQ ID NO: 96206

SEQ ID NO: 97253 - DNA, 942 bp, Listeria monocytogenes; identical to SEQ ID NO: 96207

SEQ ID NO: 97254 - DNA, 522 bp, Thalassospira sp. Nap_22
atgctgaattggctagcaaagctactcctcaccagtacggctattgcgccggtgctgctgacttatgcctgggttgcttatcaggctggggaaagtaagcaggccgccacgttactgggtgtatgcattgttctcatactggtttgccttggactgctccgctatgcaaaggcgagcctcgaacggatgaatttttctccgacgacggtggaagcggcagaccgcgagaatatgggctttttgctgctgtacctgttgcccttgttcacggctcaattttcgaccctaaactggcaagtttgggttcctgcgattgttatcttcgcgggggtcgtcgcgaccggctacagctatcatttcaacccgctgcttgggctcttaggatggcacttctacaaggtcagcaccaaggaaggtgtgacctatgtgctcatcaccaaaaagcagcttcgtaacgcaaccgaggcgatcgaggtcgggcagctcaccgaatacatcgtcatagatgtaggggggcgctaa

SEQ ID NO: 97255 - DNA, 870 bp, Thalassospira sp. Nap_22
atgccacagaatctctttgccgcttgtcgggttaataatggtcagctcattgccaagcgcgtgcgccttgacaatacggtgcaacagcaggtcgagaccattttcagggatcaagaaacatccttcagggctggtgtcacaagcgaagttgcattcgatggggcttggaaccctgacgacgatgagttcctgaccatcgatatcccagctgaagctgcgatttttgtcgatacgatcaacgccaacgccgttgccattcctgatatcaatactgctgcatttgccaatgaaggcatcaaggcgctatttacaggtagtacagtgaatggcgtaaccaaggttgtggttcagcgtttcacatctcaacagatgctagagcgcaaatttgcgttgcttcagcatggtaacgcatttcgccgactgtccgacccggcgttttctctcgatacatcactgacctgtatcgttgagggcggaaaaatcaagttcaagagccagttcaagctgcgttctatcatcaatatgcttgatatttaccgtgctgctacagaccaggaagtgcaaacctttgccggtcatgccagcttggaagttgcagacgttgctgcgtttgtcgatgtcacaaaccagactacacgaaagttgatacatgccgttgccaaaaatggcacgctcgacacttacacccctgccgcaattcaagcggctgctcaggcaactgggcttggtatcgacgtgcagaacggcaaaatcgttgtgccttctgaccatagggaaataaaagctctgttgcagtttttgaatgagagccgatacaccggcccgctatccggccagccttttgtaacaaattctcagaggccggtatga

SEQ ID NO: 97256 - DNA, 588 bp, Salmonella enterica
atgcaaaggaacacatacaacaaagtaggtctatacatcctatctttagctatgctttttgtttttattattatcctgactgccaaaatccccttttgcttcacttcggattgtagcttcataggtttgaaaaaacttgtattaacaaatattgttcctattgtttgctttgtattttttctatttagtatttatttttataatagattaaaaaacataacaaaatacaatggacaagatagcgttaaaataacatcatgtcaaagcgaaagctatgaaagtttaacattcttagcaacatacattgtaccttttatgggatttagttttgaagacatgcaaaagaatatagcatatcttttgcttgtagtagtaataggcattatttttattaaaacagacaagtattatgcgaatccaactttagctctgtttggctttaaactatacagggtaaatatactacacccaggaagtggagaaacaaaaaatctgatagctatttcaaatgatgtattaaaagtggacgataatgtttattatagtttctttgatgaatttgtttttatagcaaggaaaaaaatatga

SEQ ID NO: 97257 - DNA, 948 bp, Salmonella enterica
atgactactcagcagttaaaagaaaaaatttcaaaaataattgataactttagcggaatcagggttgtatttactactactgctaatgaactaaagctttccagaattgaagggagtgcattaaatagcatagctgaagggtttattgataaaatcaaagaagacattataaataatgaagatctcacctcacccttactgtccaattttgatgatagaaaaaatgccttgtttaaatttgattacgaacaatatcctgaagaatttaacaaaatcactcaggccatcgctatccctcctaactcacaagattattataaccctttaaataaattcacagatgtgaaaggaattataattttaataagcggagataacaaatgcttggctctttataaaaacaaaactaaccttgcagtattgagaaatagcagaaaaatgtttaatttagtccctgaccctgatggatacttgaaacaactccctaatgagatattacggttagatttcaattatgatctattttcaattggtgaggatttttacattaaaaatcacaagacacttgaaactcaaatgaaatttcatcaagtgattgaagcccaagcagttattgctttaaattctttacgggattcactactaattgaagacatatcaggtttagaaaagagttcgagagaaatttcattcgctagaaagttggcaaaaatctccaaacattctcctgttttggggaaaatagatactaaaacaattatcgattatgtatcccaacataaatatttatctgcaatacttcagattaatgaagcaggaaataagttattaattaaaaccaagacatcacagaagcatttcattaaactcatgagcgatgattatttacaatcagatctaactaaaataatatacatgagcatagcaaaagacagattagatgaatag

SEQ ID NO: 97258 - DNA, 588 bp, Salmonella enterica; identical to SEQ ID NO: 97256

SEQ ID NO: 97259 - DNA, 948 bp, Salmonella enterica; identical to SEQ ID NO: 97257

SEQ ID NO: 97260 - DNA, 588 bp, Salmonella enterica; identical to SEQ ID NO: 97256

SEQ ID NO: 97261 - DNA, 948 bp, Salmonella enterica; identical to SEQ ID NO: 97257

SEQ ID NO: 97262 - DNA, 588 bp, Salmonella enterica; identical to SEQ ID NO: 97256

SEQ ID NO: 97263 - DNA, 948 bp, Salmonella enterica; identical to SEQ ID NO: 97257

SEQ ID NO: 97264 - DNA, 588 bp, Salmonella enterica; identical to SEQ ID NO: 97256

SEQ ID NO: 97265 - DNA, 948 bp, Salmonella enterica; identical to SEQ ID NO: 97257

SEQ ID NO: 97266 - DNA, 588 bp, Salmonella enterica; identical to SEQ ID NO: 97256

SEQ ID NO: 97267 - DNA, 948 bp, Salmonella enterica; identical to SEQ ID NO: 97257

SEQ ID NO: 97268 - DNA, 588 bp, Salmonella enterica; identical to SEQ ID NO: 97256

SEQ ID NO: 97269 - DNA, 948 bp, Salmonella enterica; identical to SEQ ID NO: 97257

SEQ ID NO: 97270 - DNA, 588 bp, Salmonella enterica; identical to SEQ ID NO: 97256

SEQ ID NO: 97271 - DNA, 948 bp, Salmonella enterica; identical to SEQ ID NO: 97257

SEQ ID NO: 97272 - DNA, 588 bp, Salmonella enterica; identical to SEQ ID NO: 97256

SEQ ID NO: 97273 - DNA, 948 bp, Salmonella enterica; identical to SEQ ID NO: 97257

SEQ ID NO: 97274 - DNA, 588 bp, Salmonella enterica; identical to SEQ ID NO: 97256

SEQ ID NO: 97275 - DNA, 948 bp, Salmonella enterica; identical to SEQ ID NO: 97257

SEQ ID NO: 97276 - DNA, 597 bp, Salmonella enterica
atgaaaaaaagaacaggtttaaagtacgccttatatatattgtctttatggctattatttatatctctattcataatgtcatatgataaaaatctttttgtctcaatgtcaacatattttagcaataaagacataacaacattactatctaaaataacgccgaagaatatagtctttgcatctagctttataatgataatagctggggttcttatattcctttatttactattctcttttaactcggggtggtcagtagtctgcactgtttctgatgttaaaaatgaaagtcatgaacacctagagtttctaacaacctatgttatgcccttagtctttactgatgtaaatagcaaaaggacaatgctcaatctattaataatgatagtcgctataggaatgatctatgtaaaaacgaacaggttttattcaaacccatcattggcattgcttggatttagaatttttaaagctaaaatcaacgaccgcggaacaaaagaatttgtaataatatgccatggtgaaattgacgacaacagtaatattaaatatataaaacttgatagcggcacatgccttgcaaaagtcatccaataa

SEQ ID NO: 97277 - DNA, 978 bp, Salmonella enterica
atgttttcagcaatagataatataataaactctgccaacctatcaggtgaggcatattttgttgcagatttacaaggccaaattaacgtttatagagtagcactagaacctggtgccgagcaaaaattaacactatcatttagtgattcactaaaacgagatgtgattaatccgaatattggattaaattctttgccgatggtttcctcgctactgagcagagataagcaagtccacgagtacgactatcaagttataaatcatctcccggctgctcttgaaaaaatggctgaagtacttaactttggtgttaataacactcctcctgactttgactttgctcggcaaaatctttcttctgttaaaggcattatatattacctttgtgatgggcagggtaatggagttgttacttatcaacacaaatatccaatttccctgcataaaaaaaccaaattatcatatttttcggcaaacggaagaactcttgacgaagttacgtacgacagcattgacattaatggaaacgtcgacttcttctacttcaataataaatactatgcattaaacattagcctgttagaaagatcctacggacttgaacaagtcatcaacaatctggctgcaaatgcaaccccacatataattaatctaaatatactggatgtaaccaatcaacaaaatcctttggatatttttaatgacatgcataaaaatagaaattttatgcgcagacttgcaactactgcaaacagccctttaattcaaaatggggctataaccattgctaaaatacaaacattaatacaaaaattcccaattttgggacgaaatatcatattcaatcaaacagggttaattgaattatcatctcaaaaacaaaaactatattttatccgtttattaaataacgaagcatctttcactgccctagatcaagagccattcctagcagttgggaaagattcagccgcgtaa

SEQ ID NO: 97278 - DNA, 597 bp, Salmonella enterica; identical to SEQ ID NO: 97276

SEQ ID NO: 97279 - DNA, 978 bp, Salmonella enterica; identical to SEQ ID NO: 97277

SEQ ID NO: 97280 - DNA, 516 bp, Escherichia coli; identical to SEQ ID NO: 95682

SEQ ID NO: 97281 - DNA, 894 bp, Escherichia coli; identical to SEQ ID NO: 95683

SEQ ID NO: 97282 - DNA, 615 bp, Escherichia coli; identical to SEQ ID NO: 95636

SEQ ID NO: 97283 - DNA, 1023 bp, Escherichia coli; identical to SEQ ID NO: 96319

SEQ ID NO: 97284 - DNA, 615 bp, Escherichia coli; identical to SEQ ID NO: 95636

SEQ ID NO: 97285 - DNA, 1023 bp, Escherichia coli
atgttaaagcttgaagaattattagagtatgctgagcaacttaaggatgatgatgcggcgaaaatatcgttgtatttcattactagacatcttaaagcgggtatgagtagaaccgcaagagttgttgataaattcgattttaaaatcattaaagctccaatcgctccagatattgctaaattttttaagtatactttatcaaaccagattatttctcatgcttcgaaagatgatattgtgatgaaaaagtatactgttattgatgatgatattgataataagatttatgcctatgctatgaataacgcgatatcgttttcaaaagttattaataacgatataaagaatgataaaccagttgtacttacctctctggctgaggttcagaatgatttgtgggcctattgtattaaagtccaaaagggggctgacgtcacttattctttccgaaaaatcagcagggggaaagtcacaacaaatgaaccacaaaatatgactcagcgcgtattcgctttgtttgataaaacagataaagagttaagatcatttgatggcagcgcagtcaattttgatgacaaaatcgattgtatttatataaaagatcaattttatgtatttcataagaaaagttttgaggctattgtaggcttggaggttgagtttacagaagctgcacaaaaaacattaaatacaattaaagaacttgatcttattgaaggtttagatgttattgaacaagctattcttcataagccatcactgagaaaaattctcactcatatcgctgagaaaggtaaccatacggttctggaaaagaatgatgttcaagctatgaatgatgtgctaaaaatgtttcagaacgaagagtttaagaccaatgagcatggtaaattagtcatagaagatgagaggcaaggaagaaactttctcaaactgttaaatgattattataaacaaggcatgactacaaaaaaatactatggtacggatagcggaaatgtgattaaccctattaaggcgtaa

SEQ ID NO: 97286 - DNA, 519 bp, Escherichia coli; identical to SEQ ID NO: 95748

SEQ ID NO: 97287 - DNA, 885 bp, Escherichia coli
atggcactttttgcagtaatagataatacaattgcaacgagaattgttagagtcgaacttgatgcaacagcaagtacttctgttacggccattttccaacaacagcgtcaatattttgaaagtcatcataacaatatgataccattctatgccggttatacaccaaaacatagtgagtgttttgaaatacaaaactttactgattctgcacgcctgattgacgcagtcaataggcctaccgccgtgcctgtctgggatccgagccaaattgatattggttatattaaagcattatttgttggtgttgacgcgccagcaaaccccaatattattgcgctacaaaccttcaacaaaaaacaaatcttagatacctcaaaatcattctttggaaagctttttgcaagcaaaactacctttagtaaagctaatagcatcggttttaatgttgatgataaactagttgcaataattatcaatgatacaatacgatttaagagtttctttaatctaagaagcatttttgacatgtcgtcctatttttctgctgctactgaccaagaacttaatgcatttagtcaacttagtgtattttctactccccaaggttttgatctaaaatccgttgcagatacagtgataagaaataaagtaacactaataaatcagactgggatgctaacaccccaaaatatgtcaaagtttaaatccgaagctgctaaagtcaatttccccttacaaaccataatagttggcggtgttgagaaaattgtcatgccttcatcaaaaaaagaaataaaagcccttcttgactttcttgaggaagacatttggatttcagggataagtggaagacgctttaaatcgaattcaaagcgcccaatataa

SEQ ID NO: 97288 - DNA, 636 bp, Escherichia coli
atgacatctactaattctaacagtgcatcatgcgacaatataaagttcaaatattatctttattttttatctttgtggattttatttctatctgtttcaataatgtcctttgattgggtttttattgaaagattggttagatttattttattgaagtatacatttgaggatgtatttaacaactttaacaagttaaaagtcaggaactttgttttcattttctgtatttcgatggttttttcgggtatttcatctgtagtatatttattttcatcgttatcaagaggttggggaagcactcataaagtgagtaacgttaaaaatcaaacgcatgaacatcttgaatttttaactacttatgttatgcctcttgtattcactgacgttaatagcaaaagaacagtaatcaacctgctgctgatgatttgttttatcggtgttatttatgtcaggacaaacagattttatgccaacccatcgttggcaatacttggcttcaggttatataaatgtgttattaaaaatgatccttctggtaaggagtacacagtaatatgtagggggaaaatgtctaatgattgtcaagttaaaataaagaaaattgatgatgatactctgatcgcaaaacttatttga

SEQ ID NO: 97289 - DNA, 1008 bp, Escherichia coli
atgaaaaatgaattagaggccttcgttcaaaataatggtcttacaggtgagatgtttttcattataaacgataatgacaactatatttatcgacgtgttattttacatgatgaaaatactgaacctctcatcactgaaaatttcaaaaaatctatcactgatgaaattataaagagaatatctattaacgataatggtgatgcaataatagataatatcacggatatgaattatgaacataaaggtgtttactattttgatatcgccagcgaagataaaagcactatcattaaaataattgaagaaatatcgtcgttgacagttgctgacaaccctattgactttaaattcaatgacgtaaatctcgataacattattggtcttgtttatcacatgagtgatggtgataaaaatatttttttgtatcaacatagataccccaactttttacacaaaaaatcaaggctctcatttttaggtgagggggatgtattagttcctataccttacgatatgataaacatatccaaagtaattgatttttttgtttttgatggaattagttatgctattaacattaaattattagaagaaagatatggacttactcaagtaattgacaatatggtttctgaagtaactccaaaaatcattgaaatggagattgtcaataaatctgtcttagccgagccagagaaaatcttcgacgatatgaaagatgatcgcggtttcatgagaaaattagccagagttcttaaaaacggaatattggaactaaatatcgatgttaacattgttaatgagataaagactagtttccccacaataggaaggaatattgatataattaatgatgataatggtatacaatatataaagctgacaagtaaagcacgcaaaaaagcttttatcagattgttgaatgatgaagccgtacgttcagtcttaacacaaaagccatcgattgcacaaaatcacaaacctgaaaaaaataacactcccacatga

SEQ ID NO: 97290 - DNA, 594 bp, Escherichia coli
atgaggaatagtggcggaggcatgattttcagaaagattaatttatatattctttcattatcactcctttttttcttttttatagttatcaccatagatattccaatctgttttggtgataaatgtaagtttataggttttgaaaagttaatatctaataatgtcgtggctattatttgtgcactcctctttttatatagtattgttgcgtattttaagtttaaatatgatatcaaacaatcaaccgagattccttttgaagttgtgaaggttgaaggtataaattatgaacatttaacgtttcttgcaacctatgtaattccattaataacatttgatttcgaaaaaacaaaatacataattgttctagctatgttgctggttgttatggggattatttatattaaaacagatcttttttatgctaatccttcattagcgttgatggggtttcatatctataaacttgatggtgttttcaaaggaggggaaaaaagagatgggattatagttataacaaggaagaaaattaaaatgggcgactcagtaaaatatataaaacttgatgatagagtttactactcaggatattaa

SEQ ID NO: 97291 - DNA, 996 bp, Escherichia coli; identical to SEQ ID NO: 96041

SEQ ID NO: 97292 - DNA, 594 bp, Escherichia coli; identical to SEQ ID NO: 97290

SEQ ID NO: 97293 - DNA, 996 bp, Escherichia coli; identical to SEQ ID NO: 96041

SEQ ID NO: 97294 - DNA, 612 bp, Listeria monocytogenes; identical to SEQ ID NO: 96206

SEQ ID NO: 97295 - DNA, 942 bp, Listeria monocytogenes; identical to SEQ ID NO: 96207

SEQ ID NO: 97296 - DNA, 609 bp, Pasteurella multocida subsp. multocida PMTB2.1
atgctaaatcgatttgcaagaattttgcttactatcagctcaatatccccaatttgcctttctatttccttattaattggattacaaagcattcagggaattgatgaaatccctcataagcttgaacggcttttggggcatttactggcttgggaactatcccaaaaagagtgtgtttttttgctatctattggactgtttgtggtaagtgtactcttattcccttgggtattttaccaagcaaaaaaacaagccatactccaacaccctactcaagcatttaaattgacatctgttacaccagcccatagagaaatggcaaactattttattagttatctatttccattaatggctggcgctgagatattttccaaccttggaatcgcggtgttcttttatatgagtatatttatttgggtgagttattctggagcttgcacattcaacccaatacttgcttttatgggatataaattttatgaggctgagaggagtaataacgtacatattatttttattgcacgtaataccctcttggatatagataatagtcgtttcaaagtagttcgacttacagaacatacttatctacaagttaaggattaa

SEQ ID NO: 97297 - DNA, 903 bp, Pasteurella multocida subsp. multocida PMTB2.1
atggaattttttgcaattttaaatcaagacaacgccgagcgtatcttaagatttaatatcgatgaagaagcaaagcaacggatgactacaatttttgaggaaagtcatcaaaaatttttacaatataatgagcatgtctcatttaatgctgatgaaacgttaactagaacagaatgcttttatatcgaacaatttgaaacaggtcttgattttagttttgtaagaaataaccctgaaggtattcgcgaattatatctaggtaaaaatgctgagttggaatatattgtggctgttattgccttaactgaaagtaatgaaatcttaatacaaaattttaaccgccgtaatattgttgatttatctagaactttttggacgaatccgtttacacctaataatcaatttgtcgctgcaagctctgacggaattgctttagacgacaaacttatctcgatactttccccaaccaatacaatctactttagatctttcaatgtattacgtcatatttttgagatggatcactatttcaaggaggcaacacaagaagaaattacagcttttattgaaagagatagccattttgaagtaagtggcggatttgatttgtcacaaattgacgacactgtagtaagaaccaaggttgccatcataaataaaagccaaattttagaagactatagcgtaaaagatttgattgaagcagcaggtagcatagagtatcaacttcctgttaatgaagcgaaaaataaaatagcaatgccaaatcataaaaagcaatttaaagatctattgcagtttcttagttctaatatttacaaagatgcaatcactcaacaaacgcgtattgctaaaagtagtcggctatatattccagaaccagtcacgaaaatacaaaattaa

SEQ ID NO: 97298 - DNA, 582 bp, Steroidobacter denitrificans
atgaagagcattcgcaggaaaatagacttatacatcctttccctgggattactgttcgtattttttctcatcattaccgcggaactccctaccagctcttttcgcctcaacgatttcgcaagctggaaagaatttgcagcaagcaatccacttccaattgcctcgatgttcgcgttgctttattgcctgttcgcatactttcggttcgacttcgatctaaaaggtgccacagaaataccctttgagatacgcaagattgaagacatcaactatgagcatctgacttttctcgcaacctatgtcgttcccttgatcagctttgattttggaagcagacggcagttgatcgtgttgggcctgcttttgattgtcatgggcatcatttacatcaagacagacctgttctacgccaatccatctctcgcccttctgggttttcacatctaccgagccgacggcagtttcaagaatggcgaaagagagggaatcatcctcgtgtgtcgcgggcgactgactgaaaagcaaaaagtctcctacatcaaactggatgacaggatctactacgtcagggggaatacgtga

SEQ ID NO: 97299 - DNA, 966 bp, Steroidobacter denitrificans
gtgaacgcggccgaactgaaagagaccttgcagacgtattacgacgactacgagaacattggcgtatccgtttatgcggtattgaagaatcctgagaacccagggccactcaagctcgatattgaagcagaggcttccgttggtctgaaggagcttttcattcaaagcctgcgggacaggttttccaacaaagatgagttgaccgttatagatctttcgagcgcggatgagcgtgttgatgcggtctatgtctacgacctggagattcccgacgaactgacgtcgttggaaaccgtgatttcccaggacgatctgccgctgttgaatctgagcgatgagagcctgtcgtcaatcaaagcgctactgatcgagattggaaataatgttggtcagttggttttttataaaaccatggcaccagtcaatatcttcggaagagccagcttcttcctcaggaaaacccaaagccgccttgaaaggttggaagatgagtttctccgagtaagcgctggatttcaaatgctgcggatcaacggaagtctgctggtacttgaccttgaatccgttgaaaagagctttggattccatgatgtcatcaagcgtgaggccgcggctgggataagcgccattgaagctgctcgcttgattgtcaactccgacgtattgcgtgagcttctcgacgatgtcaagtatgcacgccgacttaccaaggttgccaaagcgtctcccgtgttaaaagctggggtcccaagccaagacatcgttcgcttttgtcaaacattccctaatcttgcagggcgtatcagattcaacgaaaccgaagacaggattgtcctggacacaaaagtctcgaaggatttgttcatcaagcttctgatggacgacttcctgacctctgagttgacgaaattccactacacaagtgtcgccaaagacagcgtggataaggaaccagaagaaccatga

SEQ ID NO: 97300 - DNA, 522 bp, Sphingobium sp. 22B; identical to SEQ ID NO: 97246

SEQ ID NO: 97301 - DNA, 867 bp, Sphingobium sp. 22B; identical to SEQ ID NO: 97247

SEQ ID NO: 97302 - DNA, 531 bp, Gluconobacter thailandicus; identical to SEQ ID NO: 96480

SEQ ID NO: 97303 - DNA, 837 bp, Gluconobacter thailandicus; identical to SEQ ID NO: 95811

SEQ ID NO: 97304 - DNA, 531 bp, Acetobacter senegalensis
atgcttggaaggctcgccaaatttctgctgattgcctcggccttagcgcccgtagggctcgtttacgcgtggctcgcctggtgcaacaagcaacacagcattgcgatgggcattgttgccgcatgcgcgatgctggtattgatctgcgtgtacctgcttcggcaggcccgtacctctttggaacgttttccgctcaatattaccagtgttgagccagccgatcgcgagaatatcgcgttcatgcttctctacctctctccgctatttacttccgaacttggacagatcaacatcaatctgctcataccaacactgttcatattcacactcttgacggcaacaggatataactatcatttcaatccattgctcggcctagttggctggcatttttataaagtcgagtctacagaaggcgtgacctacgttctcatcacacgcaagcagctcaggaatacgagcacaataaatcacgtcggccagttaaccgaatacattttgatcgatctagaggatgcgaatgcctgttaa

SEQ ID NO: 97305 - DNA, 837 bp, Acetobacter senegalensis
ttgattgtgaagcggatcaaagtaaaggctacggttcagaatcagctggagggaattttcatccagcaggagcagatgtttgttgatggcgtaaccgaggaggtaccgttcgatggaggatggagtcccgacccgcacgagcatcttgtggcccaagtgacggacgaagcagccgccatttttgcagccgctcaaggtaacatcgtagcaatgccggaagtcgatccagcgaacttcgaaaatgagaacatcagagcactgggtgtcctagtgcaacactcaactggaccacgcctgctgctacaagagttttctgcccgccagatgcttgagcgccgatttagtctaatacttgatggcaacaccttcaatagactgactcagcccgcatttgcgattggggcctctctagcaggcttcgtagaaggcgacaaaatcaagttccagaaattcagccgtatcaagctgattttcaacctaactagcctttatcaggaagcaactgatactgaggttgaaggcttctgtgagcttgaatgcatcgatgtcggtgacatcggcaaattcaaaaatctcgctgatcaaaaaatgcgaaagctgatcaatgcgatcactaagcgaggaacgctaaatgattttacacctgcacagattcaggtcgctgcagccggtgagaactttcaaattgcggtagcagacgggaagatcatcattccgtcagtgaaagcagaagcaaaagcgctccttcatttccttgacaatggcttatatcgtggcccgcttggcggagaaatctttattaccaattcaaagcgagcgctcacccccacgccctag

SEQ ID NO: 97306 - DNA, 612 bp, Listeria monocytogenes; identical to SEQ ID NO: 96206

SEQ ID NO: 97307 - DNA, 942 bp, Listeria monocytogenes; identical to SEQ ID NO: 96207

SEQ ID NO: 97308 - DNA, 597 bp, Salmonella enterica subsp. enterica serovar Typhimurium; identical to SEQ ID NO: 95980

SEQ ID NO: 97309 - DNA, 978 bp, Salmonella enterica subsp. enterica serovar Typhimurium; identical to SEQ ID NO: 95651

SEQ ID NO: 97310 - DNA, 597 bp, Salmonella enterica subsp. enterica serovar Typhimurium; identical to SEQ ID NO: 95980

SEQ ID NO: 97311 - DNA, 978 bp, Salmonella enterica subsp. enterica serovar Typhimurium; identical to SEQ ID NO: 95651

SEQ ID NO: 97312 - DNA, 597 bp, Salmonella enterica subsp. enterica serovar Typhimurium; identical to SEQ ID NO: 95980

SEQ ID NO: 97313 - DNA, 978 bp, Salmonella enterica subsp. enterica serovar Typhimurium; identical to SEQ ID NO: 95651

SEQ ID NO: 97314 - DNA, 597 bp, Salmonella enterica subsp. enterica serovar Typhimurium; identical to SEQ ID NO: 95980

SEQ ID NO: 97315 - DNA, 978 bp, Salmonella enterica subsp. enterica serovar Typhimurium; identical to SEQ ID NO: 95651

SEQ ID NO: 97316 - DNA, 597 bp, Salmonella enterica subsp. enterica serovar Typhimurium; identical to SEQ ID NO: 95980

SEQ ID NO: 97317 - DNA, 978 bp, Salmonella enterica subsp. enterica serovar Typhimurium; identical to SEQ ID NO: 95651

SEQ ID NO: 97318 - DNA, 597 bp, Salmonella enterica subsp. enterica serovar Typhimurium; identical to SEQ ID NO: 95980

SEQ ID NO: 97319 - DNA, 978 bp, Salmonella enterica subsp. enterica serovar Typhimurium; identical to SEQ ID NO: 95651

SEQ ID NO: 97320 - DNA, 597 bp, Salmonella enterica subsp. enterica serovar Typhimurium; identical to SEQ ID NO: 95980

SEQ ID NO: 97321 - DNA, 978 bp, Salmonella enterica subsp. enterica serovar Typhimurium; identical to SEQ ID NO: 95651

SEQ ID NO: 97322 - DNA, 597 bp, Salmonella enterica subsp. enterica serovar Typhimurium; identical to SEQ ID NO: 95980

SEQ ID NO: 97323 - DNA, 978 bp, Salmonella enterica subsp. enterica serovar Typhimurium; identical to SEQ ID NO: 95651

SEQ ID NO: 97324 - DNA, 597 bp, Salmonella enterica subsp. enterica serovar Typhimurium; identical to SEQ ID NO: 95980

SEQ ID NO: 97325 - DNA, 978 bp, Salmonella enterica subsp. enterica serovar Typhimurium; identical to SEQ ID NO: 95651

SEQ ID NO: 97326 - DNA, 597 bp, Salmonella enterica subsp. enterica serovar Typhimurium; identical to SEQ ID NO: 95980

SEQ ID NO: 97327 - DNA, 978 bp, Salmonella enterica subsp. enterica serovar Typhimurium; identical to SEQ ID NO: 95651

SEQ ID NO: 97328 - DNA, 597 bp, Salmonella enterica subsp. enterica serovar Typhimurium; identical to SEQ ID NO: 95980

SEQ ID NO: 97329 - DNA, 978 bp, Salmonella enterica subsp. enterica serovar Typhimurium; identical to SEQ ID NO: 95651

SEQ ID NO: 97330 - DNA, 597 bp, Salmonella enterica subsp. enterica serovar Typhimurium; identical to SEQ ID NO: 95980

SEQ ID NO: 97331 - DNA, 978 bp, Salmonella enterica subsp. enterica serovar Typhimurium; identical to SEQ ID NO: 95651

SEQ ID NO: 97332 - DNA, 597 bp, Salmonella enterica subsp. enterica serovar Typhimurium; identical to SEQ ID NO: 95980

SEQ ID NO: 97333 - DNA, 978 bp, Salmonella enterica subsp. enterica serovar Typhimurium; identical to SEQ ID NO: 95651

SEQ ID NO: 97334 - DNA, 597 bp, Salmonella enterica subsp. enterica serovar Typhimurium; identical to SEQ ID NO: 95980

SEQ ID NO: 97335 - DNA, 978 bp, Salmonella enterica subsp. enterica serovar Typhimurium; identical to SEQ ID NO: 95651

SEQ ID NO: 97336 - DNA, 597 bp, Salmonella enterica subsp. enterica serovar Typhimurium; identical to SEQ ID NO: 95980

SEQ ID NO: 97337 - DNA, 978 bp, Salmonella enterica subsp. enterica serovar Typhimurium; identical to SEQ ID NO: 95651

SEQ ID NO: 97338 - DNA, 597 bp, Salmonella enterica subsp. enterica serovar Typhimurium; identical to SEQ ID NO: 95980

SEQ ID NO: 97339 - DNA, 978 bp, Salmonella enterica subsp. enterica serovar Typhimurium; identical to SEQ ID NO: 95651

SEQ ID NO: 97340 - DNA, 597 bp, Salmonella enterica subsp. enterica serovar Typhimurium; identical to SEQ ID NO: 95980

SEQ ID NO: 97341 - DNA, 978 bp, Salmonella enterica subsp. enterica serovar Typhimurium; identical to SEQ ID NO: 95651

SEQ ID NO: 97342 - DNA, 597 bp, Salmonella enterica subsp. enterica serovar Typhimurium; identical to SEQ ID NO: 95980

SEQ ID NO: 97343 - DNA, 978 bp, Salmonella enterica subsp. enterica serovar Typhimurium; identical to SEQ ID NO: 95651

SEQ ID NO: 97344 - DNA, 597 bp, Salmonella enterica subsp. enterica serovar Typhimurium; identical to SEQ ID NO: 95980

SEQ ID NO: 97345 - DNA, 978 bp, Salmonella enterica subsp. enterica serovar Typhimurium; identical to SEQ ID NO: 95651

SEQ ID NO: 97346 - DNA, 597 bp, Salmonella enterica subsp. enterica serovar Typhimurium; identical to SEQ ID NO: 95980

SEQ ID NO: 97347 - DNA, 978 bp, Salmonella enterica subsp. enterica serovar Typhimurium; identical to SEQ ID NO: 95651

SEQ ID NO: 97348 - DNA, 597 bp, Salmonella enterica subsp. enterica serovar Typhimurium; identical to SEQ ID NO: 95980

SEQ ID NO: 97349 - DNA, 978 bp, Salmonella enterica subsp. enterica serovar Typhimurium; identical to SEQ ID NO: 95651

SEQ ID NO: 97350 - DNA, 597 bp, Salmonella enterica subsp. enterica serovar Typhimurium; identical to SEQ ID NO: 95980

SEQ ID NO: 97351 - DNA, 978 bp, Salmonella enterica subsp. enterica serovar Typhimurium; identical to SEQ ID NO: 95651

SEQ ID NO: 97352 - DNA, 579 bp, Thermococcus peptonophilus
atggaagagaaaccaacattactcacaagcctgtggctttttcttagttcatacatacccttatggattatattgctaattcagacatatgatgggatgacaggatttcatacaatattttttggttcgctgactgtattttccttactctcattgcttctctttttaagagtggcaaaacagaaaataaatgttggtggagaaaagagaatttgtgatgattttatagtgatagatgattatcaggaaatgaatcatatatacctagaatatctgatcacgtacgttgtctctatgatggcatttatcccgaaagatcaaggagtaagaaatgtcctgacttttctagtgtttatgttcatggtgttcatgttttaccttagggcaaatctcatctatgcaaatcccgtgctgggtgcattagggtataatctgtttaaagtaaagaacagagaatcgggtcattgggtaatattaataactagaaaagacaaaatactacttgcggataaaactaacccagagagaatttgtgtatcaagcctgtcaggtaatatatatctggaggtcgaagactga

SEQ ID NO: 97353 - DNA, 1161 bp, Thermococcus peptonophilus
atgggtgatgagagtgagaggagccgggctcttgccagagtgccgacaatcataactctaaagaaattccactcaaggattaatgaagttagagacatgacagttgatgtgtatcttgtggaaaataccggtaaaagaacaaaagacccaagagcttggtttaaaacacacaatctagttctccccaataagtacaagagaaaaattgtaaagttattcaaccagagattcttgagagttatcaacaaagtatcaaaagatgagacagagtttacaaacttttttgactataacaggcccttttcagtgggagttgtcagatatattgaaccttcccatattcccggattttgggtaatatggaatcagataaagcaagggggttctgtatcttcgacatcagctaggagtgtgaaatccattgttggttatgttcttgatatacagttcaaggaggggggtagggtcgccttttttgtaaagaatagaaggtcattcattctcaagaagaacagcataatggtgggattgtttagaaaacagttatcaatagcaactgatgattatacatctatccccctagcaattgattcaatatactttgagttcccagatagtgacaatgatggatggttgctggtgttgaacacaagatactttgaatcattcttcaagtactatgagcactacaagcaaattactcaggaaacaatattaaaactcaaggagtctggccttatcgaatttgaaaatgaggagaagattatgaagtatgctctcagtactgtgacaatatttagaacactaacacaactccaaaagagcaagtttttcagcttcataacagatgacggaattgacacaggttcagaaagatacaaaaattttgtcaatgatctgctagaccagctggatgttcttaaggcaaaggagaggccgaaccttaaggtaactgaagatggggaacacatcaaaattaagattgaggacaaaaagggtctgaagcagttcatagagatatgtcaagagaagtacatagcaagtgtcggtaaacggagtggggtagtaaaattttatgaagttaagggtggcgtgaaggaacttaagcaagtcccccttgatgcatggttatgggcaaaatcagagggtgagtcttcatga

SEQ ID NO: 97354 - DNA, 636 bp, Halalkalicoccus paucihalophilus
atgagtcagaggctctccgaatccgagcaagtattccgttctccggttagattaatcttatttattagctcttatgttcctttattttttataatctctcttagattgggagatgttaaaccgttattaataaaaggtctctacattcgccattttcaatttgagcttgtcttctcgtatgtttccacagtcattgcatctttttgtattataatatctcttatactatactgggtgatgaggactcaatcacaaagtggcgttatagaaaagacagtagaaagctatcaggaaaagaatgagttgttatctatgtatcttttgtcatatgtgttcgtatttgctggcttaacgttctcaaatacgattgatattgttatatttgctgtattcttcataatgcttgggatattgcagatacggtcagaaattctccatattaacccaatgctaggtatcagaggatatcatgcatacaatataactaataacggtcgaacaatactggtgatttcaaatggtcgaatcgaagagaaaataaagtttccagagaatagttctgaatcgagcacaaaaccatcacacacaaagattgaattggttccacttggtggcactacgtaccttgccccataa

SEQ ID NO: 97355 - DNA, 978 bp, Halalkalicoccus paucihalophilus
atgtcatcaggtactgaatcaattgaaaccctacgagatgcacgcggtttcgcagattctagtgttgatatagaactgctattagtacggaaacaagaaaacactcctgatgttggtaaacttcggatcggggctgacattcaagataaaattgctgaaatcactatagaatctttaaacacccatattagtaaacttgaggatggaacggtacaggcgcgtcctctagacatcggtaacacagtaggagacgaatcagtaatcgaatgcgagcaaatttcaaatcttcctgacacagaactgttccgtctactggattcccgtagcgatcatggttggactagctatagtgaagaccctaaaccagactttcagtttgtccggatcagcgagccggatggaaaggtcttggtaggtttgaaaacgtacacagatgtaactgttgtagatactagtaaaaggttgatcctaacgaataagaataacgcgaccgaatatagaagagtacgagataacctactgatcttcgagccaagatttagcgcgttctgctatgatggttggatttttattgttaaaccgaagcccttcgagaaagtttttgagatgcgggaggagtacgaacgctgtggtcaagaagtgattgattctctagagaaagctggcattacatttgctaaccccgataagacaacgagttggttgatgagtcagatcaacatgatgagggcaatgtatgaaatttacgaaaatgatattcatacaagaatcacaccggatatggtagaatcatcaattaaaaaatataaaatcacggaccgatattctattgaatactctcgaaatggtgaacaaattgagctgagtatcggcaagtatgaagaccggtggcggctcttaaaattgctgggtgggaaatttgctgaggacgatatcatgaattctcaatgggaaattgatgccggacggagactgtga

SEQ ID NO: 97356 - DNA, 594 bp, Aggregatibacter actinomycetemcomitans
atggctgattcatctttaagattaagaccttttgtatccctgatgctttttatcagtgcttatgcgcctttaatgcttattatactgattaaacaagtagattttaatatgccttactacttaaactctccgatagtcagtttgatattattaatagtggcagtatcaagtagcgtgataacgattttaactgcaaagagtgtgcgagctgggctgatggttacagtgagtaaagcgtctaataaatcaggagatatgttcggttatacaataccctatatgctttccttcatgagaattgatttgagtgaatggcaaaccataactgcaataattctatttttatcggtgttatttataatggcgtatcgaactcaaacggtttttattaatccgattttggctatttcaggatatatgttaattgattgtacatttaaacggcaggagaaagaaattcaagctatggtaataacaagagagcctattagtgcaggagattcagtttgcttggatcggctttcacattatttgtatattcgttctcaatcggactatcaaataaagaggaatcagtatgaaagcacaaattaa

SEQ ID NO: 97357 - DNA, 942 bp, Aggregatibacter actinomycetemcomitans; identical to SEQ ID NO: 95629

SEQ ID NO: 97358 - DNA, 597 bp, Salmonella enterica subsp. enterica serovar Typhimurium; identical to SEQ ID NO: 95980

SEQ ID NO: 97359 - DNA, 978 bp, Salmonella enterica subsp. enterica serovar Typhimurium; identical to SEQ ID NO: 95651

SEQ ID NO: 97360 - DNA, 597 bp, Salmonella enterica subsp. enterica serovar Typhimurium; identical to SEQ ID NO: 95980

SEQ ID NO: 97361 - DNA, 978 bp, Salmonella enterica subsp. enterica serovar Typhimurium; identical to SEQ ID NO: 95651

SEQ ID NO: 97362 - DNA, 597 bp, Salmonella enterica subsp. enterica serovar Typhimurium; identical to SEQ ID NO: 95980

SEQ ID NO: 97363 - DNA, 978 bp, Salmonella enterica subsp. enterica serovar Typhimurium; identical to SEQ ID NO: 95651

SEQ ID NO: 97364 - DNA, 597 bp, Salmonella enterica subsp. enterica serovar Typhimurium; identical to SEQ ID NO: 95980

SEQ ID NO: 97365 - DNA, 978 bp, Salmonella enterica subsp. enterica serovar Typhimurium; identical to SEQ ID NO: 95651

SEQ ID NO: 97366 - DNA, 597 bp, Salmonella enterica subsp. enterica serovar Typhimurium; identical to SEQ ID NO: 95980

SEQ ID NO: 97367 - DNA, 978 bp, Salmonella enterica subsp. enterica serovar Typhimurium; identical to SEQ ID NO: 95651

SEQ ID NO: 97368 - DNA, 597 bp, Salmonella enterica subsp. enterica serovar Typhimurium; identical to SEQ ID NO: 95980

SEQ ID NO: 97369 - DNA, 978 bp, Salmonella enterica subsp. enterica serovar Typhimurium; identical to SEQ ID NO: 95651

SEQ ID NO: 97370 - DNA, 597 bp, Salmonella enterica subsp. enterica serovar Typhimurium; identical to SEQ ID NO: 95980

SEQ ID NO: 97371 - DNA, 978 bp, Salmonella enterica subsp. enterica serovar Typhimurium; identical to SEQ ID NO: 95651

SEQ ID NO: 97372 - DNA, 597 bp, Salmonella enterica subsp. enterica serovar Typhimurium; identical to SEQ ID NO: 95980

SEQ ID NO: 97373 - DNA, 978 bp, Salmonella enterica subsp. enterica serovar Typhimurium; identical to SEQ ID NO: 95651

SEQ ID NO: 97374 - DNA, 597 bp, Salmonella enterica subsp. enterica serovar Typhimurium; identical to SEQ ID NO: 95980

SEQ ID NO: 97375 - DNA, 978 bp, Salmonella enterica subsp. enterica serovar Typhimurium; identical to SEQ ID NO: 95651

SEQ ID NO: 97376 - DNA, 597 bp, Salmonella enterica subsp. enterica serovar Typhimurium; identical to SEQ ID NO: 95980

SEQ ID NO: 97377 - DNA, 978 bp, Salmonella enterica subsp. enterica serovar Typhimurium; identical to SEQ ID NO: 95651

SEQ ID NO: 97378 - DNA, 597 bp, Salmonella enterica subsp. enterica serovar Typhimurium; identical to SEQ ID NO: 95980

SEQ ID NO: 97379 - DNA, 978 bp, Salmonella enterica subsp. enterica serovar Typhimurium; identical to SEQ ID NO: 95651

SEQ ID NO: 97380 - DNA, 597 bp, Salmonella enterica subsp. enterica serovar Typhimurium; identical to SEQ ID NO: 95980

SEQ ID NO: 97381 - DNA, 978 bp, Salmonella enterica subsp. enterica serovar Typhimurium; identical to SEQ ID NO: 95651

SEQ ID NO: 97382 - DNA, 588 bp, Vibrio parahaemolyticus; identical to SEQ ID NO: 96174

SEQ ID NO: 97383 - DNA, 987 bp, Vibrio parahaemolyticus; identical to SEQ ID NO: 96175

SEQ ID NO: 97384 - DNA, 507 bp, Thermoplasmatales archaeon DG-70
gtgagattttgggttaaaagcttattatttgtcagcgcatatactcccttgctgctcatttttattttgcgatatttcgattttcattccaaggacttctggatttgtgttacagcacttcttctcgctaacctaatctgggttccagttttcagaattgctaggggatgggctactagcacattcacggtcgtgaaatcaaagaacagaaccagcgatgccttagactacataattgcttatgtcatcgtgttcttaggatttcaattcgaacaatggcaggacgttgcatcgatcatcatactgcttattgtgattttctttgtctacattcattcaaacctgatattcgtaaacccattattgaacgtttttggatataagatccatgatgttgaggttcacacaggggagagtatcgttcttgtgacaaaggagttcatgctcgtactaggagcacatatagatacaaagaatatgtcagataacatatacctggaggtgtga

SEQ ID NO: 97385 - DNA, 1320 bp, Thermoplasmatales archaeon DG-70
atggcagaaaatattgaaaaaatcctagaagatatgcaagaaaggctcaaaaaggcgtcaaatgacagagtgaagctgttcttcattattcgcactaagaagaaaattaaaggagaaaatgggaacaaagagaataaaggtcagtccacaagagatacagaaggagatcaatcttcgagcgaggaaaatgaagatcaatctgccaatcaagaaaatcaacctactgaagagataacaagatatcagatagagtacgagattctcaatacaaagcttactccaaatgtccgtgatacatttattgacattgcgaaaaagaatatacatgaacttcttgaaacagaagacctgcggctcgagagatatgatcctgtagctgtatggagtcgacctactgtcgaatttattgaaatgagtgaagtcgaacagctggataagattcagaaagatatggagttagccaatctacatacctatgttttggaaacaggaaaagtcccttgggcatatgctgcaaaaatggacgacgcaaaactaatattgttcagaaaattctcatcaagtaaaatacttgagcgaaaaggctggattccactctttgtgaaagatggggtgttcagtaggctcgaagaacctgctctcactatagatgaagaagttgactgtatccacgatatcaaagagagaaagatgtatatcctgaataagaaggagtttgaagcgattttcagtttcatagagatgttcgtgcaagcaatcaaagccaaagagccgctcctggtaagaacgaatctcgttaataatgtccccttgcttgttaataggtgcagaacagacccgcgaaaggcaaggaaactctacagtatattggaaggtcaaactctagaccagttcgatgcacagaaagtagcaaggataaacagacaatatgtccttagtctgggattcacaccaactggacagatggttgtaaaaccgaaagacatttggagaatactcaaggtgctagctgatgattatttggtttcatctgcaacaattttgcgctacgaagtcctatccaaaacatcacatttacctagaatggcgatgcaacccaaagtcaatgctcgaacacgaactgtaactattgatggtaatgtgataaatgctgataaagtcgagtgggattggggagatggtagtaagccagaggtgatagcttctcctcctttcatccctaaggagcacccatatgccccaggtccatacacaattaccgtaaccgcttatagacgcggccgtgtaatagaaaaaacatttgacgttgagattccttaa

SEQ ID NO: 97386 - DNA, 582 bp, Aggregatibacter actinomycetemcomitans serotype e str. SA2876; identical to SEQ ID NO: 95710

SEQ ID NO: 97387 - DNA, 942 bp, Aggregatibacter actinomycetemcomitans serotype e str. SA2876; identical to SEQ ID NO: 95715

SEQ ID NO: 97388 - DNA, 582 bp, Aggregatibacter actinomycetemcomitans serotype f str. SC29R; identical to SEQ ID NO: 95710

SEQ ID NO: 97389 - DNA, 942 bp, Aggregatibacter actinomycetemcomitans serotype f str. SC29R; identical to SEQ ID NO: 95717

SEQ ID NO: 97390 - DNA, 582 bp, Aggregatibacter actinomycetemcomitans serotype d str. SA2200; identical to SEQ ID NO: 95710

SEQ ID NO: 97391 - DNA, 942 bp, Aggregatibacter actinomycetemcomitans serotype d str. SA2200; identical to SEQ ID NO: 95713

SEQ ID NO: 97392 - DNA, 582 bp, Aggregatibacter actinomycetemcomitans serotype d str. SA3033; identical to SEQ ID NO: 95710

SEQ ID NO: 97393 - DNA, 942 bp, Aggregatibacter actinomycetemcomitans serotype d str. SA3033; identical to SEQ ID NO: 95713

SEQ ID NO: 97394 - DNA, 522 bp, Vibrio sp. 2756-81
atgcttagttggttagctaaaataatgcttacatgcacagcgatagcacctgttgggtttagctatgcttgggtcgcttggttttctgataagaaagagtttgcgggacttgcaattgcagcgtcgttatttttagtgttagtttgtatttgggtgctgaggtacgcaaaaaacaatttagagtcattttcttttagagtctcttctattgaggccgcagatcgagagaatatggcttatctattgttgtacctactcccattgtttacagccagttttgatgctttaaattgggtcgtatgggcaccaatattaattatatttgcccttataaccagtacgggatacagttaccacttcaacccacttttaggtattatgaagtggcatttttacaaagttggtacacctgagggtgtgacatatgtgcttattacaaaaaaagaacttcgacgaactagtgactcgctattggttgtccagttaacggaatatattgtcctagatataggggaaaactaa

SEQ ID NO: 97395 - DNA, 885 bp, Vibrio sp. 2756-81
gtgactactcaaaacttttttgcgcttataaaagatgataacaataatcttgaagtaaaaagaattcgcgtacaggggccattgcaaaaggagcttgtgacattatttaacaaacaattgcaaagcttcaatgagggagtggatactgaagttccatttaacggtgattggaaaccagatccgaatgagttattagtgttgtcggatgtttctgaagctaaagtaatggtagatgcaattaattcaaacataacctcttaccacgcgctccagttgtcaaattttaaatcagaaccaattaaagcggtgttcacaggttttgtcgataacaatgaaacaactgtattagtacaaaaattttctagccgtcaagcactctcgttgagcgaaatacctattataaaaatgcaaacaggtaatacctttgtaaaggtaacggaagatatatttacattggatagtaaattggttgctgttattgttgggggtaatacaaagtttaaaagttttcataatgctaggatggttttcaatctaagtgatttttatcaggaagcaacagatactgaccttaaggccatttgtaagcatgcttccttagaagtagcgaatatagacaattttgtagctgaagctgatagtcaagtaaggaaaatggtccatactatttcttcaacttcattgttagataactattcagtttctgatatccaaactgcagcccaaggtttcccgaatgttccgattgcctttaatcaaggcaagcttgtattacctgcagataaacgtgagctaaaagaagttctccacttcttgttggaggatatctacaaaggtccactttcgggtagcgattatcaaaccaactctaaacggaaacgctaa

SEQ ID NO: 97396 - DNA, 618 bp, Vibrio sp. 2538-88
atgaacaccctacagaaaattaagctttacattctgtctctggcactactgtttgtgatcatagctatcattacagctaaactcccaaaagaatcatttgaatggtgtaaaccagaagaagcctgcaacacaaaagcaattttaagcaacttgtttaattatttttttctactactaaaagcaaacgttattccactagttatgcttttgttgctcgctattagctggtacttcaagtacgaattcgaccacttacttcaaggcggcggacagaaaataatccgaattcaatctatagaaaacgaagactatgaacaccttacgttcttagccacctatattattcctttctttggctttaaatttaacgacccaaatcaattcaccgcaattattgtattactcgtaatcataggtgccatatttgtaagaaccaataaatattacgctaaccctaccttagcggtacttggttataggctatataaagcaactttaaatgacaaaaatggtgtttatgaatcgattgttgtcatcagtaaagatcaattaaaagaaaacgaaattgtacactgggaaaaaatatcggataacgtattttatattaaaagaaaataa

SEQ ID NO: 97397 - DNA, 957 bp, Vibrio sp. 2538-88
atgagcaagtttaaaacgtggctagaggatttcatcaacgggtgtgatggaatagcagtatattttgtagataatgcaaaccagatacatgactctgatattgactcaaaagttctcgctaagtttcgaacggctttctgtcaggacttaagaaaaaagtacactgatagtgatgactttgaagtagagaaactttctacctttgaggagcgacctcacactctttatggttatgatttttctccaagagagatgcctttagagttcaaacttactaaaaatgtgttggacatcaaaccgactgatactattccgaaatatcaggtcaaagctaataagctcagtggtattcgtggggcaatagtactactaacaaaaggaattagtgaatccattgctttttatcagcacatattccctgtttcattattaggtccagataaaggcgtattaaacctcactacacatgccactaggcttattgagttagaaagtgacgtactgaaactcaatacaaaatttgttttcatgcaatgtacacatggatattttgttgagaacgttggcgtattagaaaccaacctccacttcaaaaaagcaataaatactcgtgccaagaagtatgctggcgaaatactatctatggggttggtagaagatacatccgtaattttagatcgtatagaaaaagaaccgacttatgctaagaaacttatctcggcatataaaaactcgatggtaatatcccaaaaaattccgatctcggacatgataacctttgctcaaaagaaagaatattacagcaaatatttaaaaccatctaaaaacggaaaaagtcttgttgttgatggtgtaaccaaaagtaagcgatttcttgagctgctaaatgataacttcctaaaatctgaactaaccaacacagaatatttagcccgttctaaaaaagcatttaagtag

SEQ ID NO: 97398 - DNA, 522 bp, Erysipelothrix rhusiopathiae
atgttaaataagctttctcatgtatttttcaactcatcaattattattccttatatacttgcgattggagtgtcttcgttgatgtctaaggaatcaatagtcggattgatatgtttattgatatccattatattagcgatatcacaaataatatttattaaatatttaagaaataatttacaagtatttaaagttaatgtaactaatgttgatgatgagggaaataattggtatatagcaagctttttatcgtatttttctccatttataaaaaatttattaagaaaagaaatagataattactcttggattttaatgggtattgcagctattttattggtattaggaaataaaacaacaaacaatccaatactgaggatagtaggatataactcatataaaattagcacggaacaaggaaaagatttcactttattaagcaagagaaatattagaaaaagcaatgacgttagaaaagtgatacgtattttcgaagatatattaatggaggtagaatattga

SEQ ID NO: 97399 - DNA, 858 bp, Erysipelothrix rhusiopathiae
ttgatttatgttttggaaaatgcaggtagagattcaacatctgtaaaaatgatagagacccaaagagaagacgatgcaagtatcaaaaaatcacttactaaaagtatagaagggtacaaagataacacaattgaatttgatggttcatataagcctgagaatgatgagagtttagtaataaaaaattttgatctgccaaatgaaataactgaagctataaataatcctctgggagtgagtcaagtttctgttaactccgataatgagctagatcttaaagctatctttgtgcctatttcagatgatgatgattgcgaaaaaataatttttcaaaggttgcctaacagacagatactgaagagccataattttacacttttttttaataaacatacattttcatgtgaaaataaaccaggtattgttataactgattgtatagacgcatactacgaatatggtaatctatattttaaatcgtattattgggcgaatcaaatatttaatctaaacaaatattatagagaagcaacaactgatgatataaaagatttttgctctaacgagtgcttctctatagatgatatagattctgtagctgagtcttgtaataactggactagaagaaaaattgcatatatattagattctggagttcttgagaataattctgtagatgaaatcattaagtctgcaaaaaatttaaacttaaaaattgatattaatgaagaaaataaaataattttccctgacgacaaggattcacaaaaagaactactatcttatttagcggaagaaatatatagaggaaacttgacagacggtgtttatttaaccaactccaagagacctttatag

SEQ ID NO: 97400 - DNA, 510 bp, Aeromonas hydrophila; identical to SEQ ID NO: 95886

SEQ ID NO: 97401 - DNA, 888 bp, Aeromonas hydrophila; identical to SEQ ID NO: 95887

SEQ ID NO: 97402 - DNA, 510 bp, Aeromonas hydrophila; identical to SEQ ID NO: 95886

SEQ ID NO: 97403 - DNA, 888 bp, Aeromonas hydrophila; identical to SEQ ID NO: 95887

SEQ ID NO: 97404 - DNA, 510 bp, Aeromonas hydrophila; identical to SEQ ID NO: 95886

SEQ ID NO: 97405 - DNA, 888 bp, Aeromonas hydrophila; identical to SEQ ID NO: 95887

SEQ ID NO: 97406 - DNA, 510 bp, Aeromonas hydrophila; identical to SEQ ID NO: 95886

SEQ ID NO: 97407 - DNA, 888 bp, Aeromonas hydrophila; identical to SEQ ID NO: 95887

SEQ ID NO: 97408 - DNA, 612 bp, Listeria monocytogenes; identical to SEQ ID NO: 96206

SEQ ID NO: 97409 - DNA, 942 bp, Listeria monocytogenes; identical to SEQ ID NO: 96207

SEQ ID NO: 97410 - DNA, 612 bp, Listeria monocytogenes; identical to SEQ ID NO: 96206

SEQ ID NO: 97411 - DNA, 942 bp, Listeria monocytogenes; identical to SEQ ID NO: 96207

SEQ ID NO: 97412 - DNA, 612 bp, Listeria monocytogenes; identical to SEQ ID NO: 96206

SEQ ID NO: 97413 - DNA, 942 bp, Listeria monocytogenes; identical to SEQ ID NO: 96207

SEQ ID NO: 97414 - DNA, 612 bp, Listeria monocytogenes; identical to SEQ ID NO: 96206

SEQ ID NO: 97415 - DNA, 942 bp, Listeria monocytogenes; identical to SEQ ID NO: 96207

SEQ ID NO: 97416 - DNA, 585 bp, Streptococcus suis
atgaaaaatggttatacttcaaaatggctattattcattacttcatatttaccgttatatttctggctattatttagtagtgttgattacactcagttggatttctcaaaatataaattagaaactctaaagtcttttcctaatatatttcgcttgatacttttatgccttataattatatcgcttgtcgaaataattaatctattcattggcagcggatctgaaataaaaacattgccaaaggacatggaaatttcacctgaaagcgatagcttaatgaattatgtagtgacatactttacaccattactttcttttgatctcaatgatatgaaatcggttatgatgaatgtgttactctttttactcattggattgatgtatgtaggtagcagtgcaacttatttaaatcctgttctgggtgtatttggatttaaaatttttggtgtatctggctttccgcatgctcatcatattatttcaagtttttcatttgatgaaatagaaacaatcaaaaatagaggagatgatgtgattagataccgattgggtgatggtatttatgttattaaaggaaaaaaataa

SEQ ID NO: 97417 - DNA, 972 bp, Streptococcus suis
atgagtgtttttgatttgaacgaggtcattagtgacttagtgtcacttgatcaacaacaaagttttgagcaaaaaatagaaatctttcttcttgtggtaaaaaagaaagaaaatgagatatacaagcaggaaagtgataatagaactaaaagagttttgtttgagtcgttaaaatcggaattagaaaaatcgagatttaaaaaccgtgaggtgatggcttatgatgcagtgttcagtaagaaaaatactcatgaattagttaatgttggtgattatgaaaatatagcaacaaagctagaggaatttaatgacgaaaataaatatttaactagtactcatggaatgaatgaaaagaaatttcacatgtatatgatttctttaaaaacagataatcataattacaaagtattcggtaacttttccaatgttctagaactcaagaaaaaatttatatttgggaatttttcagactcaaggatagaattctcggattcgaataatatcgtgggatttagtaaaaagattgaattattagtggtagacgataagtatattctaatcaatcaagcagaagctaaatttgaatcagtctttaagatgaatgctcttttctcaggtcaagcaactaagattttggaagataatgaaaaaattaaatctatattttctgataccactcgaaataagttgattgacaaagtgaaatcagggaaaaggatggcgactagacttattaaaattacaagtgatatagaccgatttaataaaacagttgacaacattaaaaaaattgaggaaattatcaaggatgatacgcataccttttacgataaagtaaaggatgtagtctattttgaagggcaacttactgttccagatggtaaagaagtacaattgcttaatgctatttctgatgccttttatcatgcaattttttcagaaacagataatgtagacgaatcgaggatgtaa

SEQ ID NO: 97418 - DNA, 552 bp, Legionella pneumophila
atgatcaataaattgaccaaagtgatgatggtcgcaacctcgcttgctccgatattattgactttgtggtttattagtattaattcagtttgggacaataatttaactttttggctcaatataaagatgcattattcttccggaataatatatcttatttctgcgatttcattaatgtttatgtgctggggattgattactatttttcaaaagaaattagaaaaaataccagtgaaaattttgtcggcaaaaacagttgataatgaaattgtaggatttgttttactttatttgtttcctttagtaaatcagccaataacaaacgtaaatgtttcagtgttaatttttgtttcaatattgttttttattgtcatttatgtttcaaatttatatcatttcaatcctttattaagttttgtaggatttcatttttatgaagtgtgtattgaaggtggaattacttacgttctaattaccaaaaaaaatataactagttgtaagaacattactagggcagttcagttaacagattatatgataatggagatctaa

SEQ ID NO: 97419 - DNA, 882 bp, Legionella pneumophila
atggatgttttccagaatttatttgcgattataaacgacaaaaatagtgcaataaaccgtataccattaactggtgcattgcaaagtgatattgctcatttatttgaagagcaaaaaaaggaatttattcgggataaacaagagcgagcattctctggaagttattccaccggttcagatgaattatttgcaattaataattatcatattacagaacaaatatttgagtctattcaaaatccaatctctatacctacgctagatttgagcaatagtatatctattaaagcccttttcaccggagcctgggatgacaacaaatcagtgtacttccaatcaatggatgcaagaaaaatattaaaaaagggatttacactaattaactcccaaaaaactttttccaaattaacagatcctggaattattttgtcaaataaacttgcggcagtctattgtaatggaaaaatattgtttcagtcgtatcatatcacgaatagatttttagatttgtcgaattattttagagaggcaacagatactgaattagatgattttatttctcatgatttatttagttgcgaagacattgaggaatttagaaaaaatgctgactcaatagttaggaaaaaaattgctttactcttaaccaataatattttagagaacataactattgctgaattggagactgtagctaaagaatttaatcaattggtgcatgatgaaaataaaattaatttaaaaattaccggtgggagacttataatacctaacgataaaaaggagttaaaagagcttatcaagtttttagacgaggattattttacaaccccatttaccaaaagaaagtgtttaaccaattccaagacctatatatcatga
